(19) United States
(12) Patent Application Publication
(10) Pub. No.: US 2011/0159520 A1
(43) Pub. Date: Jun. 30, 2011

(54) HYBRID PROTEINS COMPRISING MEMBRANE RECEPTOR AND ION CHANNEL, AND THEIR USE AS BIOSENSORS

(75) Inventors: Michel Vivaudou, Saint-egreve (FR); Christophe Moreau, Saint Nizier Du Moucherotte (FR); Jean Revilloud, Saint Martin Le Vinoux (FR); Julien Dupuis, Grenoble (FR)

(73) Assignee: UNIVERSITE JOSEPH FOURIER, Grenoble Cedex 09 (FR)

(21) Appl. No.: 12/997,649

(22) PCT Filed: Jun. 12, 2009
(86) PCT No.: PCT/EP2009/057264

§ 371 Date: Mar. 4, 2011

(30) Foreign Application Priority Data
Jun. 12, 2008 (EP) 08290547.2

(51) Int. Cl. G01N 27/26; C07K 19/00; C07H 21/04; G01N 33/53

(52) U.S. Cl. 435/7.2; 530/350; 536/23.1; 436/149

(57) ABSTRACT

The present invention relates to the use of a hybrid protein including the sequence of a first membrane receptor fused at its C-terminus to the N-terminus of an ion channel, and possibly containing a linker between the C-terminus of the first membrane receptor and the N-terminus part of the ion channel, the linker being absent in the natural configuration of the first membrane receptor and the ion channel, as a biosensor for: the screening of drugs modulating the activity of the first membrane receptor in its natural configuration, and/or for the in vitro diagnosis of pathologies associated with the presence or the variation of amount of a molecule modifying the activity of the first membrane receptor in its natural configuration.

[0001] The present invention relates to hybrid proteins comprising membrane receptor and ion channel, and their use as biosensors.

[0002] Due to their ability to selectively bind ligands with high affinity, membrane proteins (receptors, transporters) represent, in theory, biochemical probes (bioprobes) or biochemical sensors (biosensors) useful for the detection and the screening of various molecules. The use of biosensors covers numerous areas including environmental safety and food quality (detection of pollutants/contaminants), as well as human health such as medical diagnostics (detection of microorganisms, toxics) and therapeutics (drug discovery).

[0003] However, in practice, the use of biosensors to detect molecules of interest is limited due to the lack of sensitivity and the difficulties to prepare said biosensors.

[0004] Detection of ligand binding requires high amounts of purified proteins which are particularly difficult to obtain with membrane proteins, and the detection of the molecules of interest requires highly sensitive biosensors since most of the events involving hazards in human health (i.e. airborne droplets/dust transmission routes), in environmental safety and in food quality occur when causative agents are at very low concentration (down to attomolar (10⁻¹⁸M) to zeptomolar (10⁻²¹M) or even below).

[0005] Ion channels are cellular membrane proteins that mediate a wide variety of physiological functions including rapid signaling, excitability and transport [Hille B (2001) Ionic channels of excitable membranes, 3^{rd} edition, Sinauer Associates, Sunderland, M A]. They represent highly sensitive electrical sensors since the current pulses of single channels which are of the order of a few picoamperes lasting a few milliseconds, are yet detectable by conventional electrophysiological techniques. Ion-channel based biosensors are attractive because of the electrical nature of the signal, the measurable currents produced by a single channel that enable single-molecule detection, and the ability to function in the physiological context of a liquid environment.

[0006] Engineering of ion-channel derived biosensors has relied on the design of synthetic ion-conducting pores gated by simple chemical ligands [Bayley H, Jayasinghe L (2004) Functional engineered channels and pores. Mol Membr Biol. 21:209-20; Gorteau V, Bollot G, Mareda J, Pasini D, Tran D H, Lazar A N, Coleman A W, Sakai N, Matile S (2005)Synthetic multifunctional pores that open and close in response to chemical stimulation. Bioorg Med. Chem. 13:5171-80]More recent, versatile, designs consist of hybrid proteins associating a natural ion channel with the ligand binding domain of a biological receptor [Bouzat C, Gumilar F, Spitzmaul G, Wang H L, Rayes D, Hansen S B, Taylor P, Sine S M (2004) Coupling of agonist binding to channel gating in an ACh-binding protein linked to an ion channel. Nature. 430:896-900; Grutter T, Prado de Carvalho L, Dufresne V, Taly A, Fischer M, Changeux J P (2005)A chimera encoding the fusion of an acetylcholine-binding protein to an ion channel is stabilized in a state close to the desensitized form of ligand-gated ion channels. C R Biol. 328:223-34; Ohndorf U M, MacKinnon R (2005) Construction of a cyclic nucleotide-gated KcsA K⁺ channel. J Mol. Biol. 350:857-65].

[0007] US2005/063989 discloses hybrid proteins comprising ion channel Kir6.2 preferably fused to ABC transporters. SUR/Kir6.2, one of the preferred proteins of this document, is able to generate an electrical signal after stimulation of SUR part contained in the hybrid protein. However, this document mentions neither that modifications in the ion channel sequences can enhance the electric signal generation, nor the ability to develop a new membrane receptor biosensor by using other membrane receptors which, unlike SUR with Kir6.2, are not naturally associated with an ion channel.

[0008] Therefore, there is a need for new biosensors which are more sensitive and easier to prepare.

[0009] One of the aims of the invention is to provide a hybrid protein comprising a membrane receptor and an ion channel, which is very sensitive, easy to prepare and wherein the membrane receptor retains its ability to interact with its ligand and the ion channel retains its ability to generate and regulate flux of ions that produce an electrical current.

[0010] Another aim of the invention is to provide a hybrid protein that can be used in cell-free and whole-cell conditions and wherein the membrane receptor could be modified to interact with specific ligands.

[0011] The invention relates to the use of a hybrid protein comprising the sequence of a first membrane receptor covalently fused at its C-terminus to the N-terminus of a ion channel, and possibly containing a linker between the C-terminus of said first membrane receptor and the N-terminus part of said ion channel, said linker being absent in the natural configuration of said first membrane receptor and said ion channel,
[0012] said ion channel sequence being deleted of a number of amino acids ranging from 1 to the total number of amino acids of the region extending from the first amino acid at the N-terminus part of said ion channel to the first amino acids of the first α-helix of the transmembrane domain of said ion channel, possibly containing a tag sequence,
[0013] said first membrane receptor being liable to present in its extracellular domain a mutation allowing the specific interaction with a ligand different from the ligand that interacts with the first membrane receptor in its natural configuration,
[0014] said first membrane receptor being liable to present in its cytoplasmic tail, said cytoplasmic tail being a sequence delimited by the first amino acid after the last amino acid of the transmembrane helix and the last amino acid of said first membrane receptor,
   [0015] a deletion of a number of amino acids ranging from 1 to the total number of amino acids of the region delimited by the cytoplasmic tail, preferably of a number of amino acids ranging from 1 to 20, preferably of a number of amino acids ranging from 1 to 15, more preferably of a number of amino acids ranging from 1 to 10, amino acids at the C-terminus, and/or
   [0016] an addition, in particular after the last amino acid at the C-terminus of said first membrane receptor, of an additional sequence of a number of amino acids ranging from 1 to the total number of amino acids of the region delimited by the cytoplasmic tail, preferably of a number of amino acids ranging from 1 to 20 amino acids, preferably of a number of amino acids ranging from 1 to 15 amino acids, more preferably of a number of amino acids ranging from 1 to 10 amino acids, preferably contiguous, originating from a second membrane receptor different from said first membrane receptor, preferably said additional sequence corresponding to the C-terminus of said second membrane receptor, and/or
   [0017] a substitution of a number of amino acids ranging from 1 to the total number of amino acids of the region delimited by the cytoplasmic tail, preferably a number of amino acids ranging from 1 to 20 amino acids, preferably a number of amino acids ranging from 1 to 15 amino acids, more preferably a number of amino acids ranging from 1 to 10 amino acids with a substitute sequence of a number of amino acids ranging from 1 to the total number of amino acids of the region delimited by the cytoplasmic tail, preferably a number of amino acids ranging from 1 to 20 amino acids, preferably a number of amino acids ranging from 1 to 15 amino acids, more preferably a number of amino acids ranging from 1 to 10 amino acids from a second membrane receptor different from said first membrane receptor,
[0018] said hybrid protein being such that said ion channel retains the property of electrical current generation of said ion channel in its natural configuration, and that said first membrane receptor retains the ability to interact with the ligand of said first membrane receptor in its natural configuration,
   as a biosensor for:
[0019] the screening of drugs modulating the activity of said first membrane receptor in its natural configuration, and/or
[0020] for the in vitro diagnosis of pathologies associated with the presence or the variation of amount of a molecule modifying the activity of said first membrane receptor in its natural configuration.

[0021] In one advantageous embodiment the invention relates to the use of a hybrid protein comprising or consisting in
[0022] a. the sequence of a first membrane receptor, said first membrane receptor belonging to the G-protein coupled receptors (GPCR) class A family, covalently fused at its C-terminus to
[0023] b. the N-terminus sequence of an ion channel, said ion channel belonging to the potassium channel families selected from the inwardly rectifying potassium channels (Kir) family and the voltage-dependent potassium channels (Kᵥ) family,
[0024] said ion channel sequence being deleted of a number of amino acids ranging from 1 to the total number of amino acids of the region extending from the first amino acid at the N-terminus part of said ion channel to the first amino acid of the cytoplasmic α-helix that precedes the first of the two transmembrane α-helices that form the pore region of said potassium channel,
[0025] said ion channel possibly containing a tag sequence, said first membrane receptor being liable to present in its cytoplasmic tail at least one mutation, said cytoplasmic tail being a sequence delimited by the first amino acid after the last amino acid of the transmembrane helix and the last amino acid of said first membrane receptor, said mutations consisting in:
[0026] a deletion of a number of amino acids ranging from 1 to the total number of amino acids of the region delimited by the cytoplasmic tail, and/or
[0027] an addition, of an additional sequence of a number of amino acids ranging from 1 to the total number of amino acids of the region delimited by the cytoplasmic tail, originating from a second membrane receptor different from said first membrane receptor, preferably said additional sequence corresponding to the C-terminus of said second membrane receptor and/or
[0028] a substitution of a number of amino acids ranging from 1 to the total number of amino acids of the region delimited by the cytoplasmic tail, with an substitute sequence of a number of amino acids ranging from 1 to the total number of amino acids of the region delimited by the cytoplasmic tail from a second membrane receptor different from said first membrane receptor
[0029] said hybrid protein being such that said ion channel retains the property of electrical current generation of said ion channel in its natural configuration, and that said first membrane receptor retains the ability to interact with the ligand of said first membrane receptor in its natural configuration,
   as a biosensor for:
[0030] the screening of drugs modulating the activity of said first membrane receptor in its natural configuration, and/or
[0031] for the in vitro diagnosis of pathologies associated with the presence or the variation of amount of a molecule modifying the activity of said first membrane receptor in its natural configuration.

[0032] In one advantageous embodiment the invention relates to the use of a hybrid protein comprising or consisting in
[0033] a. the sequence of a first membrane receptor, said first membrane receptor belonging to the G-protein coupled receptors (GPCR) class A family, covalently fused at its C-terminus to
[0034] b. the N-terminus sequence of an ion channel, said ion channel belonging to the potassium channel families selected from the inwardly rectifying potassium channels (Kir) family and the voltage-dependent potassium channels (Kᵥ) family,
[0035] c. and possibly containing a linker sequence between the C-terminus of said first membrane receptor and the N-terminus part of said ion channel, said linker being absent in the natural configuration of said first membrane receptor and said ion channel,
[0036] said ion channel sequence being deleted of a number of amino acids ranging from 1 to the total number of amino acids of the region extending from the first amino acid at the N-terminus part of said ion channel to the first amino acid of the cytoplasmic α-helix that precedes the first of the two transmembrane α-helices that form the pore region of said potassium channel, preferably being deleted from 1 to 49 amino acids at the N-terminus part of said Kir ion channel, or being deleted from 1 to 435 amino acids at the N-terminus of said Kv ion channel
[0037] said ion channel possibly containing a tag sequence,
[0038] said first membrane receptor being liable to present in its extracellular domain a mutation allowing the specific interaction with a ligand different from the ligand that interacts with the first membrane receptor in its natural configuration,
[0039] said first membrane receptor being liable to present in its cytoplasmic tail, said cytoplasmic tail being a sequence delimited by the first amino acid after the last amino acid of the transmembrane helix and the last amino acid of said first membrane receptor, in particular being liable to present in the 100 amino acids in its C-terminus part
   [0040] a deletion of a number of amino acids ranging from 1 to the total number of amino acids of the region delimited by the cytoplasmic tail, preferably of a number of amino acids ranging from 1 to 100, preferably of a number of amino acids ranging from 1 to 70, preferably of a number of amino acids ranging from 1 to 20 preferably of a number of amino acids ranging from 1 to 15, more preferably of a number of amino acids ranging from 1 to 10, amino acids at the C-terminus, provided that said deletion does not affect the transmembrane amino acid sequence of said membrane receptor and/or
   [0041] an addition, in particular after the last amino acid at the C-terminus of said first membrane receptor, of an additional sequence of a number of amino acids ranging from 1 to the total number of amino acids of the region delimited by the cytoplasmic tail, preferably of a number of amino acids ranging from 1 to 100 amino acids, preferably of a number of amino acids ranging from 1 to 70, preferably of a number of amino acids ranging from 1 to 20 amino acids, preferably of a number of amino acids ranging from 1 to 15 amino acids, more preferably of a number of amino acids ranging from 1 to 10 amino acids, preferably contiguous, originating from a second membrane receptor different from said first membrane receptor, preferably said additional sequence corresponding to the C-terminus of said second membrane receptor, and/or
   [0042] a substitution of a number of amino acids ranging from 1 to the total number of amino acids of the region delimited by the cytoplasmic tail, preferably a number of amino acids ranging from 1 to 20 amino acids, preferably a number of amino acids ranging from 1 to 15 amino acids, more preferably a number of amino acids ranging from 1 to 10 amino acids with an substitute sequence of a number of amino acids ranging from 1 to the total number of amino acids of the region delimited by the cytoplasmic tail, preferably a number of amino acids ranging from 1 to 20 amino acids, preferably a number of amino acids ranging from 1 to 15 amino acids, more preferably a number of amino acids ranging from 1 to 10 amino acids from a second membrane receptor different from said first membrane receptor
[0043] said hybrid protein being such that said ion channel retains the property of electrical current generation of said ion channel in its natural configuration, and that said first membrane receptor retains the ability to interact with the ligand of said first membrane receptor in its natural configuration,
   as a biosensor for:
[0044] the screening of drugs modulating the activity of said first membrane receptor in its natural configuration, and/or
[0045] for the in vitro diagnosis of pathologies associated with the presence or the variation of amount of a molecule modifying the activity of said first membrane receptor in its natural configuration.

[0046] In one particular embodiment, the inventions relates to the use of a hybrid protein comprising the sequence of a first membrane receptor fused at its C-terminus to the N-terminus of a ion channel, and possibly containing a linker between the C-terminus of said first membrane receptor and the N-terminus part of said ion channel, said linker being absent in the natural configuration of said first membrane receptor and said ion channel,
[0047] said ion channel sequence being deleted of a number of amino acids ranging from 1 to 29 amino acids at the N-terminus part of said ion channel, possibly containing a tag sequence,
[0048] said first membrane receptor being liable to present in the 70 amino acids in its C-terminus part
   [0049] a deletion of a number of amino acids ranging from 1 to 20, preferably of a number of amino acids ranging from 1 to 15, more preferably of a number of amino acids ranging from 1 to 10, amino acids at the C-terminus, and/or
   [0050] an addition, in particular after the last amino acid at the C-terminus of said first membrane receptor, of an additional sequence of a number of amino acids ranging from 1 to 20 amino acids, preferably of a number of amino acids ranging from 1 to 15 amino acids, more preferably of a number of amino acids ranging from 1 to 10 amino acids, preferably contiguous, originating from a second membrane receptor different from said first membrane receptor, preferably said additional sequence corresponding to the C-terminus of said second membrane receptor, and/or
   [0051] a substitution of a number of amino acids ranging from 1 to 20 amino acids, preferably a number of amino acids ranging from 1 to 15 amino acids, more preferably a number of amino acids ranging from 1 to 10 amino acids with an substitute sequence of a number of amino acids ranging from 1 to 20 amino acids, preferably a number of amino acids ranging from 1 to 15 amino acids, more preferably a number of amino acids ranging from 1 to 10 amino acids from a second membrane receptor different from said first membrane receptor,
[0052] said hybrid protein being such that said ion channel retains the property of electrical current generation of said ion channel in its natural configuration, and that said first membrane receptor retains the ability to interact with the ligand of said first membrane receptor in its natural configuration,
   as a biosensor for:
[0053] the screening of drugs modulating the activity of said first membrane receptor in its natural configuration, and/or
[0054] for the in vitro diagnosis of pathologies associated with the presence or the variation of amount of a molecule modifying the activity of said first membrane receptor in its natural configuration.

[0055] The invention is based on the unexpected observation made by the inventors that a hybrid protein comprising or constituted by a membrane receptor fused to an ion channel, modified in its N-terminus part, can be used as efficient biosensor to measure the membrane receptor activity. This observation is based on the fact that the ion channel and the membrane receptor, involved in the hybrid protein, retain the biological function of the corresponding proteins in their natural configuration.

[0056] Then, to summarize, the hybrid proteins disclosed in the invention can be constituted as follows:

1—a membrane receptor sequence, in its natural configuration, fused to the N-terminus deleted sequence of a ion channel, or
2—a membrane receptor sequence, deleted in its C-terminus part, fused to the N-terminus deleted sequence of a ion channel, or
3—a membrane receptor sequence, having an addition at the C-terminus of an additional sequence from a second membrane receptor, fused to the N-terminus deleted sequence of a ion channel, or
4—a membrane receptor sequence, having a substitution at the C-terminus with a substitution sequence from a second membrane receptor, fused to the N-terminus deleted sequence of a ion channel.

[0057] Possibly, a linker can be present between the sequence of the membrane receptor and the sequence of the ion channel.

[0058] Thus, the hybrid proteins disclosed in the invention can be constituted as follows:

1—a membrane receptor sequence, in its natural configuration, fused to a linker sequence, said linker sequence being fused to the N-terminus deleted sequence of a ion channel, or
2—a membrane receptor sequence, deleted in its C-terminus part, fused to a linker sequence, said linker sequence being fused to the N-terminus deleted sequence of a ion channel, or
3—a membrane receptor sequence, having an addition at the C-terminus of an additional sequence from a second membrane receptor, fused to a linker sequence, said linker sequence being fused to the N-terminus deleted sequence of a ion channel, or
4—a membrane receptor sequence, having an substitution at the C-terminus with a substitution sequence from a second membrane receptor, fused to the N-terminus deleted sequence of a ion channel, fused to a linker sequence, said linker sequence being fused to the N-terminus deleted sequence of a ion channel.

[0059] These hybrid proteins are illustrated in the FIG. 1.

[0060] The term “and/or” wherever used herein includes the meaning of “and”, “or” and “all or any other combination of the elements connected by said term”.

[0061] The terms “after” and “before” refer respectively to the position of an amino acid immediately following or preceding the position of an other amino acid, in the same amino acid sequence, starting at the N-terminal and ending at the C-terminal

[0062] The terms “first” and “last” refer respectively to the position of an amino acid located at the first position or at the end of an amino acid sequence starting at the N-terminal and ending at the C-terminal.

[0063] In the invention, the hybrid protein is constituted by at least a first protein fused in its C-terminus part to the N-terminus of a second protein. Possibly, the hybrid protein according to the invention can be constituted by the fusion of a first C-terminus part to the N-terminus of a second protein

[0064] In the invention, the term “linker” refers to amino acid sequence linking the first part of the hybrid protein to the second part. In particular, linker, according to the invention, is an amino acid sequence comprising or consisting of at least one amino acid. This linking sequence is absent in the natural sequence of said first or said second membrane receptor and in the natural sequence of said ion channel, i.e., linker is absent in the natural configuration of said first membrane receptor and said ion channel.

[0065] According to the invention, the N-terminus part and C-terminus part respectively correspond to the first half part of a protein and to the second half part. For example, for a protein containing 10 amino acids, the 5 first amino acids correspond to the N-terminus and the 5 last amino acids correspond to C-terminus. This definition is a broad definition of N-terminus part and C-terminus part commonly accepted in the art.

[0066] Therefore, terms “sequence delimited by the first amino acid after the last transmembrane helix and the last amino acid of said membrane receptor” means that the sequence begins at the position corresponding to the first amino acid following the last amino acid of the transmembrane helix and extends to the end of the protein.

[0067] According to the invention, “a hybrid protein” defines a fusion protein. A fusion protein, also known as a chimeric protein, is a protein created through the joining of two or more genes which originally coded for separate proteins. The translation of this fusion gene results in a single polypeptide with functional properties derived from each of the original proteins. Recombinant fusions proteins are created artificially by routine protocols known in the art for their use in biological research or therapeutics.

### Receptors

[0068] According to the invention, a “membrane receptor” is a protein on the cell membrane that binds to a specific molecule (a ligand), and initiates the cellular response to the ligand. Ligand-induced changes in the behavior of receptor proteins result in physiological changes that constitute the biological actions of the ligand.

[0069] According to the invention, the membrane receptor proteins can exist in 2 forms such as peripheral membrane proteins and transmembrane proteins. Preferably, the membrane receptors of the invention are transmembrane receptors. These receptors are embedded in the phospholipid bilayer of cell membranes and allow the activation of signal transduction pathways in response to the activation by the binding molecule.

[0070] Transmembrane receptor contains 3 conserved domains: an extracellular domain that allows the interaction with the ligand, a transmembrane domain that includes at least 1 hydrophobous α-helix, and an intracellular domain which serves as an anchor platform for adaptator molecules.

[0071] According to the invention, the “cytoplasmic tail” corresponds to the cytoplasmic domain. It is structurally defined by the amino acid sequence delimited by the first amino acid after the transmembrane domain (after the hydrophobous α-helix) to the last amino acid of the receptor. It is common for a person with a skill to easily define without ambiguity the transmembrane α-helix of a membrane protein. Therefore, the terms “region delimited by the cytoplasmic tail” means “cytoplasmic tail” or cytoplasmic domain.

[0072] The terms “first membrane receptor” refer to the above definition of membrane receptor.

[0073] As ligand, it is defined according to the invention, any molecule able to specifically interact with said receptor, and optionally able to modify receptor activity or function. For example, said ligand can reduce or enhance signal generated in cell after said receptor activation.

[0074] These above-mentioned molecules can be the natural ligand of said receptor, i.e., the molecule that naturally interacts with said receptor, or any other molecules such as antibodies, artificial, chemical or biological compound liable to form a stable interaction with said receptor.

[0075] According to the invention, “last amino acids after the transmembrane domain” means the amino acids present in the sequence of amino acids that immediately follows the sequence of the transmembrane domain of said first membrane receptor. “amino acid that immediately follows the sequence” can be the first amino acid immediately after the transmembrane domain, or the second amino acid, or the third amino acid.

[0076] According to the invention, “sequence delimited by the last amino acids after the transmembrane domain to the last amino acid of said first membrane receptor” defines a sequence that begins at the first amino acid that immediately follows the sequence of transmembrane domain and extends to the last amino acid of the first membrane receptor, at the C-terminus part.

[0077] In one advantageous embodiment, the extracellular domain of the first membrane receptor can be mutated, in particular in the domain that allows the interaction with the ligand. This mutation (substitution, deletion, insertion) does not modify the tri-dimensional conformation neither of the intracellular domain, nor of the complete protein, but allows the mutated receptor to interact with a ligand different from the ligand that interacts with the first membrane receptor in its natural configuration.

[0078] Indeed, it has been recently demonstrated that mutations in the extracellular domain, preferably in the ligand interaction domain, can transform the receptor ligand specificity to allow the interaction with any ligand, as defined above [Armbruster B N, Li X Pausch M H, Herlitze S, Roth B L (2007) Evolving the lock to fit the key to create a family of G protein-coupled receptors potently activated by an inert ligand. Proc Natl Acad Sci USA. 104:5163-8].

[0079] In a preferred embodiment, the membrane receptor according to the invention belongs to the GPCR class A membrane receptor. Thus, de facto, natural membrane receptor containing ion channel sequence, such as nicotinic receptor, or 5HT3 receptor are excluded.

### Ion Channels

[0080] According to the invention, ion channel is defined as a pore-forming protein that helps to establish, and control, the voltage gradient across the plasma membrane of all living cells (cell membrane potential) [Hille B (2001) Ionic channels of excitable membranes, 3^{rd} edition, Sinauer Associates, Sunderland, M A] Ion channels allow the flow of ions down their electrochemical gradient. They are present in the membranes that surround all biological cells.

[0081] Ion channels regulate the flow of ions across the membrane in all cells. They are integral membrane proteins; or, more typically, assemblies of several proteins. Such “multi-subunit” assemblies usually involve a circular arrangement of identical or homologous proteins closely packed around a water-filled pore through the plane of the membrane or lipid bilayer. The pore-forming subunits are often called a subunits, while the auxiliary subunits are denoted β, γ, and so on. While some channels permit the passage of ions based solely on charge, the archetypal channel pore is just a few atoms wide at its narrowest point. It conducts a specific species of ion, such as sodium or potassium, and conveys them through the membrane single file—nearly as quickly as the ions move through free fluid. In some ion channels, passage through the pore is governed by a “gate,” which may be opened or closed by chemical or electrical signals, temperature, or mechanical force, depending on the variety of channel [Hille B (2001) Ionic channels of excitable membranes, 3^{rd} edition, Sinauer Associates, Sunderland, M A]

[0082] The advantageous ions channels of the invention are the potassium channel families selected from
[0083] the inwardly rectifying potassium channels (Kir) family and
[0084] the voltage-dependent potassium channels (Kᵥ) family.

[0085] In the invention, a channel that is “inwardly-rectifying” is one that passes current (positive charge) more easily in the inward direction (into the cell). It is thought that this current may play an important role in regulating the resting level of neuronal activity.

[0086] To date, 15 members of the Kir family have been identified: Kir1.1, Kir2.1, Kir2.2, Kir2.3, Kir2.4, Kir3.1, Kir3.2, Kir3.3, Kir3.4, Kir4.1, Kir4.2, Kir5.1, Kir6.1, Kir6.2 and Kir7.1.

[0087] In the invention “voltage-dependant potassium channels” are transmembrane channels specific for potassium and sensitive to voltage changes in the cell's membrane potential. They play a crucial role during action potentials in returning the depolarized cell to a resting state. To date, 40 voltage-dependant potassium channels alpha subunits alpha are known in human, the alpha subunit of Kv ion channels form the actual conductance pore.

[0088] The more preferred Kv receptors according to the invention are Kv1.1, Kv1.2, Kv1.3, Kv1.4, Kv1.5, Kv1.6, Kv1.7, Kv1.8, Kv2.1, Kv2.2, Kv3.1, Kv3.2, Kv3.3, Kv3.4, Kv4.1, Kv4.2, Kv4.3, Kv5.1, Kv6.1, Kv6.2, Kv6.3, Kv6.4, Kv7.1, Kv7.2, Kv7.3, Kv7.4, Kv7.5, Kv8.1, Kv8.2, Kv9.1, Kv9.2, Kv9.3, Kv10.1, Kv10.2, Kv11.1, Kv11.2, Kv11.3, Kv12.1, Kv12.2 and Kv12 (see for instance [Gutman et al. 2005, Pharmacol Rev 57:473-508])

[0089] There are strong sequence homologies among all channels of the Kir family (Kir1.1 to Kir7.1). This suggests a common architecture that would be similar to that of Kir channels from bacteria [Kuo et al. (2003) Science. 300:1922-6].

[0090] Moreover, comparing the structures of tetrameric voltage-dependent K channels [Long et al, (2005) Science. 309:897-903] and of Kir channels [Kuo et al. (2003) Science. 300:1922-6] demonstrates that the core regions (slide helix+ last two transmembrane helices) are identical in structure despite divergence in sequences, and that voltage-dependent channels are much like a voltage-sensing domain attached to a Kir channel [FIG. 1 of Swartz et al., (2008) Nature. 456:891-7; FIG. 6c&d of Long et al., (2007) Nature. 450:376-82]. The common structure between these two types of ions channels is represented in the grey box in FIG. 16.

[0091] Ion channels differ between each other by the ion they let pass (for example, Na⁺, K⁺, Cl⁻, Ca²⁺), their regulation, the number of subunits which compose the pore and other structural aspects. Channels belonging to the largest class of the voltage-gated channels consist of four subunits, each subunit having six transmembrane helices. Upon activation, these helices move about and open the pore. Two of these six helices are separated by a loop that lines the pore and is the primary determinant of ion selectivity and conductance in this channel class and some others.

[0092] The channel subunits of one such other class, for instance, consist of “Pore” loop and have two transmembrane helices.

[0093] The two helices, found in all ions channels are easy to identify, from the amino acid sequence, to a person with ordinary skill.

[0094] According to the invention, terms “deleted of a number of amino acids ranging from 1 to the total number of amino acids of the region” means that one sequence of amino acids can be deleted of 1, or 2, or 3, etc. . . . . to all the amino acids that constitute said sequence of amino acids. For instance, if a sequence of amino acids consists of 50 amino acids, the sequence can be deleted of 1, or 2, or 3, or 4 . . . or 48, or 49 or 50 amino acids. The deletion of 50 amino acids then consists of a deletion of all amino acids.

[0095] According to the invention, the phrase “deleted from the first amino acid at the N-terminus part of said ion channel to the first amino acid of the cytoplasmic α-helix that precedes the first of the two transmembrane α-helices that form the pore region of said potassium channel” means that all amino acids from the first amino acid of the channel, e.g., from the Methionine, to the first amino acid of the cytoplasmic α-helix that precedes the first of the two transmembrane α-helices that form the pore region of said potassium channel can be deleted.

[0096] According to the invention, “first amino acid of the cytoplasmic α-helix that precedes the first of the two transmembrane α-helices that form the pore region of said potassium channel” defined a region at the N-terminus of the α-helix region, comprising 1 to 5 amino acids, that are characteristic of the α-helix domain, but that can be deleted, without modification of the α-helix structure, and without modifying the pore structure. 1 to 5 amino acids means 1, or 2 or 3 or 4 or 5 amino acids.

[0097] According to the invention, the hybrid protein is constituted by the fusion of two different proteins. Then, even if the two proteins involved have a different size in their amino acid sequences, it is considered that the first protein, i.e. membrane receptor, corresponds to the N-terminus of the hybrid protein, and the second protein, i.e. ion channel, corresponds to the C-terminus of the hybrid protein.

[0098] Terms “N-terminus”, “amino terminal”, “amino terminus” and “N-ter” are uniformly used hereafter to designate the first part of a protein. Terms “C-terminus”, “carboxy terminal”, “carboxy terminus” and “C-ter” are uniformly used hereafter to designate the second part of a protein.

[0099] In summary, the hybrid protein of the invention comprises, in its amino terminal part, the sequence of a membrane receptor, optionally truncated and optionally fused to a linker, i.e. a linking sequence, said linker itself being linked to the truncated sequence of a ion channel, said truncated sequence of ion channel corresponding to the carboxy-terminal part of the hybrid protein.

[0100] Regarding the deletion at the N-terminus of the Kir ion channel, it is disclosed in the Example section hereafter that deletion of 25 amino acids of the N-terminus part of Kir6.2 allows the generation of an electric flux when said deleted Kir6.2 is fused to a membrane receptor.

[0101] Based on this observation, a skilled person knows that such a deletion can be carried out in the other Kir ion channel. By aligning sequences of Kir channel, as shown in FIG. 17, the skilled person knows that he must delete the N-terminus part of the Kir channels in order to obtain a similar deletion with those obtained in Kir6.2.

[0102] In other words, the skilled person can easily determine the exact number of amino acid he have to delete at the N-terminus of another Kir ion channel, by comparing its sequence to Kir6.2 sequence.

[0103] In other words, a deletion of the Kir channel from the first amino acid at the N-terminus part of said Kir channel to the first amino acid of the cytoplasmic α-helix that precedes the first of the two transmembrane α-helices that form the pore region of said potassium channel means preferably that:

the sequence of kir1.1 is deleted of one amino acid to the total number of amino acids extending from the first amino acid to the amino acid at the position 36, the sequence of kir2.1 is deleted of one amino acid to the total number of amino acids extending from the first amino acid to the amino acid at the position 41, the sequence of kir2.2 is deleted of one amino acid to the total number of amino acids extending from the first amino acid to the amino acid at the position 40, the sequence of kir2.3 is deleted of one amino acid to the total number of amino acids extending from the first amino acid to the amino acid at the position 15, the sequence of kir2.4 is deleted of one amino acid to the total number of amino acids extending from the first amino acid to the amino acid at the position 46, the sequence of kir3.1 is deleted of one amino acid to the total number of amino acids extending from the first amino acid to the amino acid at the position 40, the sequence of kir3.2 is deleted of one amino acid to the total number of amino acids extending from the first amino acid to the amino acid at the position 51, the sequence of kir3.3 is deleted of one amino acid to the total number of amino acids extending from the first amino acid to the amino acid at the position 18, the sequence of kir3.4 is deleted of one amino acid to the total number of amino acids extending from the first amino acid to the amino acid at the position 47, the sequence of kir4.1 is deleted of one amino acid to the total number of amino acids extending from the first amino acid to the amino acid at the position 24, the sequence of kir4.2 is deleted of one amino acid to the total number of amino acids extending from the first amino acid to the amino acid at the position 23, the sequence of kir5.1 is deleted of one amino acid to the total number of amino acids extending from the first amino acid to the amino acid at the position 30, the sequence of kir6.1 is deleted of one amino acid to the total number of amino acids extending from the first amino acid to the amino acid at the position 30, the sequence of kir6.2 is deleted of one amino acid to the total number of amino acids extending from the first amino acid to the amino acid at the position 29 and the sequence of kir7.1 is deleted of one amino acid to the total number of amino acids extending from the first amino acid to the amino acid at the position 14.

[0104] The terms “deleted of one amino acid to the total number of amino acids extending from the first amino acid to the amino acid at the position 36” means that the corresponding Kir1.1 sequence is deleted of the first amino acid, or of the first and the second amino acid, or of the first and the second and the third amino acid, or of the first and the second and the third and the fourth amino acid . . . or from the first to the thirty sixth amino acid. This definition applies mutatis mutandis to all above cited Kir receptors.

[0105] In an advantageous embodiment, the hybrid fusion according to the invention comprises a Kir ion channel such as:

the sequence of kir1.1 is deleted of one amino acid to the total number of amino acids extending from the first amino acid to the amino acid at the position 32, the sequence of kir2.1 is deleted of one amino acid to the total number of amino acids extending from the first amino acid to the amino acid at the position 37, the sequence of kir2.2 is deleted of one amino acid to the total number of amino acids extending from the first amino acid to the amino acid at the position 36, the sequence of kir2.3 is deleted of one amino acid to the total number of amino acids extending from the first amino acid to the amino acid at the position 11, the sequence of kir2.4 is deleted of one amino acid to the total number of amino acids extending from the first amino acid to the amino acid at the position 42, the sequence of kir3.1 is deleted of one amino acid to the total number of amino acids extending from the first amino acid to the amino acid at the position 36, the sequence of kir3.2 is deleted of one amino acid to the total number of amino acids extending from the first amino acid to the amino acid at the position 46, the sequence of kir3.3 is deleted of one amino acid to the total number of amino acids extending from the first amino acid to the amino acid at the position 14, the sequence of kir3.4 is deleted of one amino acid to the total number of amino acids extending from the first amino acid to the amino acid at the position 43, the sequence of kir4.1 is deleted of one amino acid to the total number of amino acids extending from the first amino acid to the amino acid at the position 20, the sequence of kir4.2 is deleted of one amino acid to the total number of amino acids extending from the first amino acid to the amino acid at the position 19, the sequence of kir5.1 is deleted of one amino acid to the total number of amino acids extending from the first amino acid to the amino acid at the position 26, the sequence of kir6.1 is deleted of one amino acid to the total number of amino acids extending from the first amino acid to the amino acid at the position 26, the sequence of kir6.2 is deleted of one amino acid to the total number of amino acids extending from the first amino acid to the amino acid at the position 25 and the sequence of kir7.1 is deleted of one amino acid to the total number of amino acids extending from the first amino acid to the amino acid at the position 10.

[0106] In a most advantageous embodiment, the hybrid protein according to the invention comprises a Kir channel such as:

the sequence of kir1.1 is deleted of all its first 32 amino acids at the N-terminus, the sequence of kir2.1 is deleted of all its first 37 amino acids at the N-terminus, the sequence of kir2.2 is deleted of all its first 36 amino acids at the N-terminus, the sequence of kir2.3 is deleted of all its first 11 amino acids at the N-terminus, the sequence of kir2.4 is deleted of all its first 42 amino acids at the N-terminus, the sequence of kir3.1 is deleted of all its first 36 amino acids at the N-terminus, the sequence of kir3.2 is deleted of all its first 46 amino acids at the N-terminus, the sequence of kir3.3 is deleted of all its first 14 amino acids at the N-terminus, the sequence of kir3.4 is deleted of all its first 43 amino acids at the N-terminus, the sequence of kir4.1 is deleted of all its first 20 amino acids at the N-terminus, the sequence of kir4.2 is deleted of all its first 19 amino acids at the N-terminus, the sequence of kir5.1 is deleted of all its first 26 amino acids at the N-terminus, the sequence of kir6.1 is deleted of all its first 26 amino acids at the N-terminus, the sequence of kir6.2 is deleted of all its first 25 amino acids at the N-terminus and the sequence of kir7.1 is deleted of all its first 10 amino acids at the N-terminus.

[0107] According to the invention, in preferred hybrid proteins described, the Kv ion channel amino acid sequence is preferably deleted “of a number of amino acids ranging from 1 to 435 amino acids at the N-terminus part of said Kv ion channel”. These terms mean that the Kv ion channel sequence is deleted of 1, or 2, or 3, or 4, or 5, or 6, or 7, or 8, or 9, or 10, or 11, or 12, or 13, or 14, or 15, or 16, or 17, or 18, or 19, or 20, or 21, or 22, or 23, or 24, or 25, or 26, or 27, or 28, or 29, or 30, or 31, or 32, or 33, or 34, or 35, or 36, or 37, or 38, or 39, or 40, or 41, or 42, or 43, or 44, or 45, or 46, or 47, or 48, or 49, or 50, or 51, or 52, or 53, or 54, or 55, or 56, or 57, or 58, or 59, or 60, or 61, or 62, or 63, or 64, or 65, or 66, or 67, or 68, or 69, or 70, or 71, or 72, or 73, or 74, or 75, or 76, or 77, or 78, or 79, or 80, or 81, or 82, or 83, or 84, or 85, or 86, or 87, or 88, or 89, or 90, or 91, or 92, or 93, or 94, or 95, or 96, or 97, or 98, or 99, or 100, or 101, or 102, or 103, or 104, or 105, or 106, or 107, or 108, or 109, or 110, or 111, or 112, or 113, or 114, or 115, or 116, or 117, or 118, or 119, or 120, or 121, or 122, or 123, or 124, or 125, or 126, or 127, or 128, or 129, or 130, or 131, or 132, or 133, or 134, or 135, or 136, or 137, or 138, or 139, or 140, or 141, or 142, or 143, or 144, or 145, or 146, or 147, or 148, or 149, or 150, or 151, or 152, or 153, or 154, or 155, or 156, or 157, or 158, or 159, or 160, or 161, or 162, or 163, or 164, or 165, or 166, or 167, or 168, or 169, or 170, or 171, or 172, or 173, or 174, or 175, or 176, or 177, or 178, or 179, or 180, or 181, or 182, or 183, or 184, or 185, or 186, or 187, or 188, or 189, or 190, or 191, or 192, or 193, or 194, or 195, or 196, or 197, or 198, or 199, or 200, or 201, or 202, or 203, or 204, or 205, or 206, or 207, or 208, or 209, or 210, or 211, or 212, or 213, or 214, or 215, or 216, or 217, or 218, or 219, or 220, or 221, or 222, or 223, or 224, or 225, or 226, or 227, or 228, or 229, or 230, or 231, or 232, or 233, or 234, or 235, or 236, or 237, or 238, or 239, or 240, or 241, or 242, or 243, or 244, or 245, or 246, or 247, or 248, or 249, or 250, or 251, or 252, or 253, or 254, or 255, or 256, or 257, or 258, or 259, or 260, or 261, or 262, or 263, or 264, or 265, or 266, or 267, or 268, or 269, or 270, or 271, or 272, or 273, or 274, or 275, or 276, or 277, or 278, or 279, or 280, or 281, or 282, or 283, or 284, or 285, or 286, or 287, or 288, or 289, or 290, or 291, or 292, or 293, or 294, or 295, or 296, or 297, or 298, or 299, or 300, or 301, or 302, or 303, or 304, or 305, or 306, or 307, or 308, or 309, or 310, or 311, or 312, or 313, or 314, or 315, or 316, or 317, or 318, or 319, or 320, or 321, or 322, or 323, or 324, or 325, or 326, or 327, or 328, or 329, or 330, or 331, or 332, or 333, or 334, or 335, or 336, or 337, or 338, or 339, or 340, or 341, or 342, or 343, or 344, or 345, or 346, or 347, or 348, or 349, or 350, or 351, or 352, or 353, or 354, or 355, or 356, or 357, or 358, or 359, or 360, or 361, or 362, or 363, or 364, or 365, or 366, or 367, or 368, or 369, or 370, or 371, or 372, or 373, or 374, or 375, or 376, or 377, or 378, or 379, or 380, or 381, or 382, or 383, or 384, or 385, or 386, or 387, or 388, or 389, or 390, or 391, or 392, or 393, or 394, or 395, or 396, or 397, or 398, or 399, or 400, or 401, or 402, or 403, or 404, or 405, or 406, or 407, or 408, or 409, or 410, or 411, or 412, or 413, or 414, or 415, or 416, or 417, or 418, or 419, or 420, or 421, or 422, or 423, or 424, or 425, or 426, or 427, or 428, or 429, or 430, or 431, or 432, or 433, or 434, or 435 amino acids. As mentioned above, the skilled person can easily, by comparing Kir and Kv ion channels sequences by using software (clustal . . . ), determine the exact number of amino acids he has to delete at the N-terminus of a determined Kv receptor.

[0108] The invention is based on the observation that the deletion of the N-terminus part of ion channel confers to the hybrid protein a highly unexpected sensitivity in current generation. Indeed, whereas a hybrid protein comprising membrane receptor fused to non-truncated (at the N-terminus part) ion channel is not able to generate an efficiently detectable electrical signal when a molecule binds to the receptor, the hybrid protein of the invention is able to generate a highly detectable electrical signal.

[0109] Then, all the hybrid proteins described hereafter are therefore deleted at the N-terminus part of the ion channel sequence, as above-mentioned.

[0110] In a preferred embodiment, the deletion of amino acids in the first part of said ion channel is a deletion of contiguous amino acids.

[0111] As tag, it is defined in the invention, a peptide, a polypeptide originating from a protein that differs from the protein of interest, i.e. membrane receptor or ion channel. Tags allow the purification of protein containing them, and are used because some specific antibodies directed against these sequences are available.

[0112] Tag sequence is inserted in the hybrid protein sequence either at the C-terminus or the N-terminus part of the hybrid protein, i.e. at the N-terminus part of the membrane receptor part of said hybrid protein or at the C-terminus part of the ion channel part of said hybrid protein.

[0113] The tag sequence can also be inserted into the sequence of hybrid protein, with the proviso that this insertion does not modify the membrane receptor and ion channel properties.

[0114] The hybrid protein defined in the invention, with a deleted sequence in the ion channel part, possibly contains in the membrane receptor part a modification of the C-terminus part, particularly in the 100 last amino acids. This modification, also called mutation, can be a deletion, an addition or a substitution.

[0115] In the case of a deletion, the amino terminus part of membrane receptor defined above is deleted of 1 or more, to 100 amino acids. Terms “of 1 or more, to 100 amino acids” means that the deletion corresponds to a deletion of 1, or 2, or 3, or 4, or 5, or 6, or 7, or 8, or 9, or 10, or 11, or 12, or 13, or 14, or 15, or 16, or 17, or 18, or 19, or 20, or 21, or 22, or 23, or 24, or 25, or 26, or 27, or 28, or 29, or 30, or 31, or 32, or 33, or 34, or 35, or 36, or 37, or 38, or 39, or 40, or 41, or 42, or 43, or 44, or 45, or 46, or 47, or 48, or 49, or 50, or 51, or 52, or 53, or 54, or 55, or 56, or 57, or 58, or 59, or 60, or 61, or 62, or 63, or 64, or 65, or 66, or 67, or 68, or 69, or 70, or 71, or 72, or 73, or 74, or 75, or 76, or 77, or 78, or 79, or 80, or 81, or 82, or 83, or 84, or 85, or 86, or 87, or 88, or 89, or 90, or 91, or 92, or 93, or 94, or 95, or 96, or 97, or 98, or 99, or 100 amino acids. The deletion preferably begins at the last amino acid in the C-terminus membrane receptor sequence and extend from 1 to 100 amino acids, and extends until to 100 amino acids in the direction of the N-terminus of said membrane receptor. In particular embodiment, the deletion mentioned above covers a deletion from 1 to 70, preferably from 1 to 20, more preferably from 1 to 15 amino acids in the C-terminus part of membrane receptors as defined above. In another particular embodiment, the deletion extends from 1 to 10 amino acids as defined above.

[0116] The truncation defined above is preferably contiguous, which means that, if two amino acids are deleted, the deletion concerns two contiguous amino acids. The same rule is applied for more than two amino acids.

[0117] In the case of addition, one or more amino acids of a second membrane receptor are added to the sequence of said first membrane receptor. The terms “second membrane receptor” refer to the above definition of membrane receptor. The second membrane receptor is different from the first receptor, which means that said second membrane receptor has an amino acid sequence that differs from the amino acid sequence of said first membrane receptor. Said first and said second membrane receptors can belong to the same family of membrane receptors. For example, for illustrating the concept, the first membrane receptor can be the erythropoietin receptor and the second membrane receptor can be the thrombopoietin receptors. These two receptors belong to the cytokine receptor family, but do not have the same amino acid sequence.

[0118] The terms “an additional sequence of 1 to 100 amino acids,” means that 1, or 2, or 3, or 4, or 5, or 6, or 7, or 8, or 9, or 10, or 11, or 12, or 13, or 14, or 15, or 16, or 17, or 18, or 19, or 20, or 21, or 22, or 23, or 24, or 25, or 26, or 27, or 28, or 29, or 30, or 31, or 32, or 33, or 34, or 35, or 36, or 37, or 38, or 39, or 40, or 41, or 42, or 43, or 44, or 45, or 46, or 47, or 48, or 49, or 50, or 51, or 52, or 53, or 54, or 55, or 56, or 57, or 58, or 59, or 60, or 61, or 62, or 63, or 64, or 65, or 66, or 67, or 68, or 69, or 70, or 71, or 72, or 73, or 74, or 75, or 76, or 77, or 78, or 79, or 80, or 81, or 82, or 83, or 84, or 85, or 86, or 87, or 88, or 89, or 90, or 91, or 92, or 93, or 94, or 95, or 96, or 97, or 98, or 99, or 100 amino acids originating from the second membrane receptor are added to the sequence of the first membrane receptor.

[0119] In one preferred embodiment, the amino acids originating from said second membrane receptor are added directly after the last amino acid of the C-terminus part of said first membrane receptor.

[0120] In the case of substitution, one or more amino acids of a second membrane receptor replace one or more amino acids of the sequence of said first membrane receptor. The term “substitute sequence” means that the amino acids sequence of said second membrane receptor takes the place of the amino acids of said first membrane receptor.

[0121] According to the invention, the substitution concerns 1, or 2, or 3, or 4, or 5, or 6, or 7, or 8, or 9, or 10, or 11, or 12, or 13, or 14, or 15, or 16, or 17, or 18, or 19, or 20 amino acids originating from first membrane receptor that are replaced by 1, or 2, or 3, or 4, or 5, or 6, or 7, or 8, or 9, or 10, or 11, or 12, or 13, or 14, or 15, or 16, or 17, or 18, or 19, or 20 amino acids originating from first membrane receptor. The length of substitute sequence and the length of the substituted sequence are preferably the same. Preferably, the substitution concerns contiguous amino acids, as defined above.

[0122] In a particular embodiment, the above defined substitution occurs in the C-terminus part of said first membrane receptor, and the substitution sequence originates from the C-terminus part of said second membrane receptor.

[0123] In addition, the above mentioned hybrid proteins, with or without tag sequence, can be mutated in the extracellular domain of the first membrane receptor.

[0124] The terms “channel retains the property of electrical signal generation” are defined, according to the invention, by the fact that the ion channel part, contained in the hybrid protein, is able to generate an ionic current with a similar and/or equivalent and/or best efficiency that the ionic current generated by the ion channel naturally existing in non-manipulated cells.

[0125] The ionic current generated by an ion channel in its natural configuration or by the hybrid protein is easy to detect with routine protocols and materials of electrophysiology, such as patch clamp, microelectrode recordings, or artificial lipid bilayer recordings [Hamill O P, Marty A, Neher E, Sakmann B, Sigworth F J (1981) Improved patch-clamp techniques for high-resolution current recording from cells and cell-free membrane patches. Pflügers Arch-Eur J. Physiol. 391:85-100; Ashcroft F M (2000) Studying ion channels. In: Ion channels and disease, Academic Press; Priest B T, Swensen A M, McManus O B (2007) Automated electrophysiology in drug discovery. Curr Pharm Des. 13:2325-37].

[0126] The terms “membrane receptor retains the ability to interact with the ligand” are defined, according to the invention, by the membrane receptor being able to interact with a ligand, as defined above, with an efficiency similar and/or equivalent to that observed when ligand and membrane receptor naturally exist in non-manipulated cells.

[0127] The determination of ligand binding affinity, by measuring binding-dependent signals at different concentrations of ligand, are used to compare the ability of a membrane receptor in its natural configuration and the membrane receptor comprised in the hybrid protein, to interact with a ligand. Established techniques to measure receptor affinity include the use of labelled ligands to quantify binding or the detection of products (GTP, cAMP) resulting from the ligand-induced activation of receptors [Thomsen W, Frazer J, Unett D (2005) Functional assays for screening GPCR targets. Curr Opin Biotechnol. 16:655-65].

[0128] By “natural configuration” it is meant in the invention that protein is in a configuration that corresponds to the configuration naturally found in cells, when the protein is normally expressed by the translation of the corresponding gene product.

[0129] Also, “in natural configuration” means that protein can be purified and isolated from cells, said isolation, and/or purification, not altering their configuration.

[0130] According to the invention, the hybrid protein is used as a biosensor for the screening of drugs modulating the activity. By “drug modulating the activity” it is meant any chemical or biological compound or molecule able to modulate, the receptor activity.

[0131] The modulation concerns an increase or a decrease of membrane receptor activity.

[0132] According to the invention, the drug modifies the activity of the hybrid protein defined above, said modification in the activity being measured by the variation of the electric current generated by the ion channel part of said hybrid protein. Since the membrane receptor part of said hybrid protein retains the properties of the membrane receptor in its natural configuration, said drug will be able to modulate the normal activity of the membrane receptor in its natural configuration.

[0133] In the invention, the hybrid protein can also be used as a biosensor for the in vitro diagnosis of pathologies associated with the presence or the variation of amount of a molecule modifying the activity of said first membrane receptor in its natural configuration.

[0134] As defined above, since the membrane receptor part of said hybrid protein retains the properties of the membrane receptor in its natural configuration, any ligand of membrane receptor in its natural configuration will be able to interact with the membrane receptor part of said hybrid protein. Then, if a pathology is associated with the presence, the absence or the variation of amount of a natural ligand of a membrane receptor in its natural configuration, the variation of hybrid protein generated current allows to determine the presence, the absence or the variation of amount of a natural ligand in a biological sample.

[0135] In an advantageous embodiment, the invention relates to the use of a hybrid protein defined above, wherein said ion channel sequence is deleted of a number of amino acids ranging from 1 to the total number of amino acids of the region extending from the first amino acid at the N-terminus part of said ion channel to the first amino acid of the cytoplasmic α-helix that precedes the first of the two transmembrane α-helices that form the pore region of said potassium channel, preferably is deleted from 1 to 49 amino acids at the N-terminus part of said Kir ion channel, or is deleted from 1 to 435 amino acids at the N-terminus of said Kv ion channel, the numbering being defined from the first amino acid at the N-terminus of said ion channel in its natural configuration.

[0136] According to the invention, the terms “the numbering being defined from the first amino acid at the N-terminus of said ion channel in its natural configuration” means that position 1 correspond to the initial methionine of the ion channel. By extension, position 2 corresponds to the amino acid immediately after the initial methionine . . . .

[0137] According to the invention, terms “deleted from the sequence delimited by amino acids in position 1 to amino acid corresponding to the first amino acids of the transmembrane α-helix” means that the deletion corresponds to the N-terminus part of the ion channel that is not inserted in the membrane. When the ion channel amino acid sequence or its structure can predict an hydrophobous α-helix (i.e. a putative transmembrane domain), the deletion must be stopped immediately before this α-helix.

[0138] According to the invention, the deletion from the position 1 to the position 29 means that the deletion covers an amino acid sequence of 29 contiguous amino acids. Also, from the position 1 to position 25 means that the deletion cover a sequence of 25 contiguous amino acids . . . .

[0139] In one other advantageous embodiment, the invention relates to the use of a hybrid protein comprising the sequence of a first membrane receptor fused at its C-terminus to the N-terminus of a ion channel defined above:
[0140] is present in said hybrid protein in its natural configuration, or
[0141] is deleted of a number of amino acids ranging from 1 to the total number of amino acids of the region extending from the first amino acid at the N-terminus part of said ion channel to the first amino acids of the first α-helix of the transmembrane domain of said ion channel, or
[0142] has an addition, of an additional sequence of a number of amino acids ranging from 1 to the total number of amino acids of the region delimited by the cytoplasmic tail, originating from a second membrane receptor different from said first membrane receptor, preferably said additional sequence corresponding to the C-terminus of said second membrane receptor, or
[0143] has, a substitution of a number of amino acids ranging from 1 to the total number of amino acids of the region delimited by the cytoplasmic tail, with a substitute sequence of a number of amino acids ranging from 1 to the total number of amino acids of the region delimited by the cytoplasmic tail from a second membrane receptor different from said first membrane receptor, and a linker is possibly present between the C-terminus of said first membrane receptor and the N-terminus part of said ion channel, said linker being absent in the respective natural configuration of said first membrane receptor and said ion channel.

[0144] In one other advantageous embodiment, the invention relates to the use of a hybrid protein comprising the sequence of a first membrane receptor fused at its C-terminus to the N-terminus of a ion channel defined above, wherein:
[0145] said ion channel sequence is deleted of a number of amino acids ranging from 1 to the total number of amino acids of the region extending from the first amino acid at the N-terminus part of said ion channel to the first amino acid of the cytoplasmic α-helix that precedes the first of the two transmembrane α-helices that form the pore region of said potassium channel, preferably is deleted from 1 to 49 amino acids at the N-terminus part of said Kir ion channel, or is deleted from 1 to 435 amino acids at the N-terminus of said Kv ion channel, and
[0146] said first membrane receptor is present in said hybrid protein in its natural configuration, and
[0147] a linker is present between the C-terminus of said first membrane receptor and the N-terminus part of said ion channel, said linker being absent in the natural configuration of said first membrane receptor and said ion channel.

[0148] According to the invention, the sequence of hybrid protein comprises, in the amino N-terminus, the sequence of a membrane receptor in its natural configuration, fused to a linker, itself fused to a ion channel deleted sequence being deleted of a number of amino acids ranging from 1 to the total number of amino acids of the region extending from the first amino acid at the N-terminus part of said ion channel to the first amino acid of the cytoplasmic α-helix that precedes the first of the two transmembrane α-helices that form the pore region of said potassium channel, preferably being deleted from 1 to 49 amino acids at the N-terminus part of said Kir ion channel, or being deleted from 1 to 435 amino acids at the N-terminus of said Kv ion channel, in its N-terminus part.

[0149] As mentioned above, the deletion of the amino acid sequence in the N-terminus of the ion channel part preferably corresponds to a deletion of contiguous amino acids.

[0150] This construction retains the complete sequence of the first membrane receptor and is able to generate an electrical signal, via the ion channel part, when stimulated by a ligand, and to activate signaling pathways normally activated by the first membrane receptor in its natural configuration.

[0151] In another advantageous embodiment, the invention relates to the use of a hybrid protein comprising the sequence of a first membrane receptor fused at its C-terminus to the N-terminus of a ion channel defined above, wherein:
[0152] said ion channel sequence is deleted of a number of amino acids ranging from 1 to the total number of amino acids of the region extending from the first amino acid at the N-terminus part of said ion channel to the first amino acid of the cytoplasmic α-helix that precedes the first of the two transmembrane α-helices that form the pore region of said potassium channel, preferably is deleted from 1 to 49 amino acids at the N-terminus part of said Kir ion channel, or is deleted from 1 to 435 amino acids at the N-terminus of said Kv ion channel, and
[0153] said first membrane receptor is deleted of a number of amino acids ranging from 1 to the total number of amino acids of the region delimited by the cytoplasmic tail, preferably of a number of amino acids ranging from 1 to 100, preferably of a number of amino acids ranging from 1 to 70, preferably of a number of amino acids ranging from 1 to 20, preferably of a number of amino acids ranging from 1 to 15, more preferably of a number of amino acids ranging from 1 to 10, amino acids at the C-terminus, and
[0154] a linker is present between the C-terminus of said first membrane receptor and the N-terminus part of said ion channel, said linker being absent in the natural configuration of said first membrane receptor and said ion channel

[0155] According to the invention, the sequence of hybrid protein comprises, in the amino N-terminus, the sequence of a membrane receptor deleted in C-terminus part of all the amino acids of the cytoplasmic tail, preferably of 1 to 100, preferably of a number of amino acids ranging from 1 to 70, preferably of a number of amino acids ranging from 1 to 20, preferably of a number of amino acids ranging from 1 to 15, more preferably of a number of amino acids ranging from 1 to 10, fused to a linker, itself fused to an ion channel deleted of a number of amino acids ranging from 1 to the total number of amino acids of the region extending from the first amino acid at the N-terminus part of said ion channel to the first amino acid of the cytoplasmic α-helix that precedes the first of the two transmembrane α-helices that form the pore region of said potassium channel, preferably being deleted from 1 to 49 amino acids at the N-terminus part of said Kir ion channel, or being deleted from 1 to 435 amino acids at the N-terminus of said Kv ion channel, in its N-terminus part.

[0156] As mentioned above, the deletion of the amino acid sequence in the N-terminus of the ion channel part preferably corresponds to a deletion of contiguous amino acids.

[0157] This construction retains the majority of the sequence of the first membrane receptor and is able to generate an electrical signal, via the ion channel part, when stimulated by a ligand, and to quasi-normally activate signaling pathways normally activated by the first membrane receptor in its natural configuration. This deletion in the first membrane receptor sequence allows to bring close to each other the two sequences comprised in the hybrid protein, and then to induce a best transmission of signal between the first membrane receptor activated by its ligand, and the ion channel able to generate an electrical signal.

[0158] In one other particular embodiment, the invention relates to the use of a hybrid protein above-described, wherein said first membrane receptor has a deletion of contiguous amino acids at the C-terminus

[0159] The hybrid protein defined above has a contiguous deletion of 1 to 100 amino acids, in the C-terminus of the membrane receptor part.

[0160] In another advantageous embodiment, the invention relates to the use of a hybrid protein comprising the sequence of a first membrane receptor fused at its C-terminus to the N-terminus of an ion channel according to described above, wherein:
[0161] said ion channel sequence is deleted of a number of amino acids ranging from 1 to the total number of amino acids of the region extending from the first amino acid at the N-terminus part of said ion channel to the first amino acid of the cytoplasmic α-helix that precedes the first of the two transmembrane α-helices that form the pore region of said potassium channel, preferably is deleted from 1 to 49 amino acids at the N-terminus part of said Kir ion channel, or is deleted from 1 to 435 amino acids at the N-terminus of said Kv ion channel, at the N-terminus part of said ion channel, and
[0162] an addition, in particular after the last amino acid at the C-terminus of said first membrane receptor, of an additional sequence of a number of amino acids ranging from 1 to the total number of amino acids of the region delimited by the cytoplasmic tail, preferably of a number of amino acids ranging from 1 to to 100, preferably of a number of amino acids ranging from 1 to 70, preferably of a number of amino acids ranging from 1 to 20, preferably of a number of amino acids ranging from 1 to 15, more preferably of a number of amino acids ranging from 1 to 10 amino acids, preferably contiguous, originating from a second membrane receptor different from said first membrane receptor, preferably said additional sequence corresponding to the C-terminus of said second membrane receptor, and
[0163] a linker is present between the C-terminus of said first membrane receptor and the N-terminus part of said ion channel, said linker being absent in the natural configuration of said first membrane receptor and said ion channel.

[0164] According to the invention, the sequence of hybrid protein comprises, in the amino N-terminus, the sequence of a membrane receptor has in C-terminus part an addition of all the amino acids of the cytoplasmic tail, preferably of 1 to 100, preferably of a number of amino acids ranging from 1 to 70, preferably of a number of amino acids ranging from 1 to 20, preferably of a number of amino acids ranging from 1 to 15, more preferably of a number of amino acids ranging from 1 to 10, fused to a linker, itself fused to a ion channel sequence being deleted of a number of amino acids ranging from 1 to the total number of amino acids of the region extending from the first amino acid at the N-terminus part of said ion channel to the first amino acid of the cytoplasmic α-helix that precedes the first of the two transmembrane α-helices that form the pore region of said potassium channel, preferably being deleted from 1 to 49 amino acids at the N-terminus part of said Kir ion channel, or being deleted from 1 to 435 amino acids at the N-terminus of said Kv ion channel, in its N-terminus part.

[0165] The additional sequence is preferably originated from the C-terminus of a second membrane receptor.

[0166] This addition in the first membrane receptor sequence enhances the communication between of the sequences comprised in the hybrid protein, and then to induce a best transmission of signal between the first membrane receptor activated by its ligand, and the ion channel able to generate an electrical signal.

[0167] In another particular embodiment, the invention relates to the use of a hybrid protein above-described, wherein said first membrane has an addition after the last amino acid at the C-terminus of an additional sequence corresponding to contiguous amino acids from the C-terminus of a second membrane receptor different from said first membrane receptor.

[0168] The hybrid protein defined above has an addition of an additional sequence of 1 to 100 contiguous amino acids, originating from the C-terminus of a second membrane receptor.

[0169] In another preferred embodiment, the invention also relates to the use of a hybrid protein comprising the sequence of a first membrane receptor fused at its C-terminus to the N-terminus of a ion channel above-mentioned, wherein:
[0170] said ion channel sequence is deleted of a number of amino acids ranging from 1 to the total number of amino acids of the region extending from the first amino acid at the N-terminus part of said ion channel to the first amino acid of the cytoplasmic α-helix that precedes the first of the two transmembrane α-helices that form the pore region of said potassium channel, preferably is deleted from 1 to 49 amino acids at the N-terminus part of said Kir ion channel, or is deleted from 1 to 435 amino acids at the N-terminus of said Kv ion channel, and
[0171] said first membrane receptor has, at the C-terminus part, a substitution of a number of amino acids ranging from 1 to the total number of amino acids of the region delimited by the cytoplasmic tail, preferably a number of amino acids ranging from 1 to 20 amino acids, preferably a number of amino acids ranging from 1 to 15 amino acids, more preferably a number of amino acids ranging from 1 to 10 amino acids with a substitute sequence of a number of amino acids ranging from 1 to the total number of amino acids of the region delimited by the cytoplasmic tail, preferably a number of amino acids ranging from 1 to 20 amino acids, preferably a number of amino acids ranging from 1 to 15 amino acids, more preferably a number of amino acids ranging from 1 to 10 amino acids from a second membrane receptor different from said first membrane receptor, and
[0172] a linker is present between the C-terminus of said first membrane receptor and the N-terminus part of said ion channel, said linker being absent in the natural configuration of said first membrane receptor and said ion channel.

[0173] According to the invention, the sequence of hybrid protein comprises, in the N-terminus, the sequence of a membrane receptor with in its C-terminus part a substitution of 1 to all the amino acids of the cytoplasmic tail, preferably from 1 to 20 amino acids, with a substitution sequence comprising 1 to all the amino acids of the cytoplasmic tail, preferably 1 to 20 amino acids, amino acids originating from a second membrane receptor different from said first membrane receptor, fused to a linker, itself fused to an ion channel deleted of a number of amino acids ranging from 1 to the total number of amino acids of the region extending from the first amino acid at the N-terminus part of said ion channel to the first amino acids of the first α-helix of the transmembrane domain of said ion channel, preferably of a number of amino acids ranging from 1 to 29 amino acids, in its N-terminus part.

[0174] The substitution sequence is preferably originated from the C-terminus of a second membrane receptor.

[0175] This substitution in the first membrane receptor sequence enhances the communication between said two sequences, and induces a best transmission of signal between the first membrane receptor activated by its ligand, and the ion channel able to generate an electrical signal.

[0176] In one preferred embodiment, the invention relates to the use of a hybrid protein above-described, wherein said first membrane, at the C-terminus part, has a contiguous substitute sequence originating from the C-terminus of a second membrane receptor different from said first membrane receptor.

[0177] The hybrid protein defined above has a substitution of 1 to 20 amino acids, to all the amino acids of the cytoplasmic tail with a substitution sequence of 1 to 20, to all the amino acids of the cytoplasmic tail, contiguous originating from the C-terminus of a second membrane receptor.

[0178] In one preferred embodiment, the invention relates to the use of a hybrid protein defined above, comprising a linker present between the C-terminus of said first membrane receptor and the N-terminus part of said ion channel, said linker being absent in the natural configuration of said first membrane receptor and said ion channel, in particular comprising or constituted by six contiguous glycine residues, represented by the following sequence: -G-G-G-G-G-G- (SEQ ID NO 196).

[0179] In another advantageous embodiment, the invention relates to the use of a hybrid protein comprising the sequence of a first membrane receptor fused at its C-terminus to the N-terminus of a ion channel above-described, wherein:
[0180] said ion channel sequence is deleted of a number of amino acids ranging from 1 to the total number of amino acids of the region extending from the first amino acid at the N-terminus part of said ion channel to the first amino acid of the cytoplasmic α-helix that precedes the first of the two transmembrane α-helices that form the pore region of said potassium channel, preferably is deleted from 1 to 49 amino acids at the N-terminus part of said Kir ion channel, or is deleted from 1 to 435 amino acids at the N-terminus of said Kv ion channel, and
[0181] said first membrane receptor is present in said hybrid protein in its natural configuration, and
[0182] said hybrid protein having no linker between the C-terminus of said first membrane receptor and the N-terminus part of said ion channel.

[0183] The invention also relates, in one advantageous embodiment, to the use of a hybrid protein comprising the sequence of a first membrane receptor fused at its C-terminus to the N-terminus of a ion channel defined above, wherein:
[0184] said ion channel sequence is deleted of a number of amino acids ranging from 1 to the total number of amino acids of the region extending from the first amino acid at the N-terminus part of said ion channel to the first amino acid of the cytoplasmic α-helix that precedes the first of the two transmembrane α-helices that form the pore region of said potassium channel, preferably is deleted from 1 to 49 amino acids at the N-terminus part of said Kir ion channel, or is deleted from 1 to 435 amino acids at the N-terminus of said Kv ion channel, and
[0185] said first membrane receptor is deleted of a number of amino acids ranging from 1 to the total number of amino acids of the region delimited by the cytoplasmic tail, preferably of a number of amino acids ranging from 1 to 20, preferably of a number of amino acids ranging from 1 to 15, more preferably of a number of amino acids ranging from 1 to 10, amino acids at the C-terminus, and
[0186] said hybrid protein has no linker between the C-terminus of said first membrane receptor and the N-terminus part of said ion channel.

[0187] This deletion in the first membrane receptor sequence allows to bring close to each other the two sequences comprised in the hybrid protein, and then to induce a best transmission of signal between the first membrane receptor activated by its ligand, and the ion channel able to generate an electrical signal.

[0188] In another specific embodiment, the invention relates to the use of a hybrid protein above-mentioned, wherein said first membrane receptor has a deletion of 2 to many contiguous amino acids at the C-terminus, such deletion possibly extending from the C-terminus extremity to the first transmembrane helix of the receptor.

[0189] Also, in one other particular embodiment, the invention relates to the use of a hybrid protein comprising the sequence of a first membrane receptor fused at its C-terminus to the N-terminus of a ion channel previously described, wherein:
[0190] said ion channel sequence is deleted of a number of amino acids ranging from 1 to the total number of amino acids of the region extending from the first amino acid at the N-terminus part of said ion channel to the first amino acid of the cytoplasmic α-helix that precedes the first of the two transmembrane α-helices that form the pore region of said potassium channel, preferably is deleted from 1 to 49 amino acids at the N-terminus part of said Kir ion channel, or is deleted from 1 to 435 amino acids at the N-terminus of said Kv ion channel, and
[0191] an addition, in particular after the last amino acid at the C-terminus of said first membrane receptor, of an additional sequence of a number of amino acids ranging from 1 to the total number of amino acids of the region delimited by the cytoplasmic tail, preferably of a number of amino acids ranging from 1 to 20 amino acids, preferably of a number of amino acids ranging from 1 to 15 amino acids, more preferably of a number of amino acids ranging from 1 to 10 amino acids, preferably contiguous, originating from a second membrane receptor different from said first membrane receptor, preferably said additional sequence corresponding to the C-terminus of said second membrane receptor, and
[0192] said hybrid protein has no linker between the C-terminus of said first membrane receptor and the N-terminus part of said ion channel.

[0193] This addition in the first membrane receptor sequence enhances the communication between receptor and channel in the hybrid protein, and induces a best transmission of signal between the first membrane receptor activated by its ligand, and the ion channel able to generate an electrical signal.

[0194] Moreover, in another advantageous embodiment, the invention relates to the use of a hybrid protein described herein, wherein said first membrane has an addition after the last amino acid at the C-terminus of an additional sequence corresponding to contiguous amino acids from the C-terminus of a second membrane receptor different from said first membrane receptor.

[0195] In another advantageous embodiment, the invention relates to the use of a hybrid protein comprising the sequence of a first membrane receptor fused at its C-terminus to the N-terminus of a ion channel above-mentioned, wherein:
[0196] said ion channel sequence is deleted of a number of amino acids ranging from 1 to the total number of amino acids of the region extending from the first amino acid at the N-terminus part of said ion channel to the first amino acid of the cytoplasmic α-helix that precedes the first of the two transmembrane α-helices that form the pore region of said potassium channel, preferably is deleted from 1 to 49 amino acids at the N-terminus part of said Kir ion channel, or is deleted from 1 to 435 amino acids at the N-terminus of said Kv ion channel, and
[0197] said first membrane receptor has, at the C-terminus part, a substitution of a number of amino acids ranging from 1 to the total number of amino acids of the region delimited by the cytoplasmic tail, preferably a number of amino acids ranging from 1 to 20 amino acids, preferably a number of amino acids ranging from 1 to 15 amino acids, more preferably a number of amino acids ranging from 1 to 10 amino acids with an substitute sequence of a number of amino acids ranging from 1 to the total number of amino acids of the region delimited by the cytoplasmic tail, preferably a number of amino acids ranging from 1 to 20 amino acids, preferably a number of amino acids ranging from 1 to 15 amino acids, more preferably a number of amino acids ranging from 1 to 10 amino acids from a second membrane receptor different from said first membrane receptor, and
[0198] said hybrid protein has no linker between the C-terminus of said first membrane receptor and the N-terminus part of said ion channel.

[0199] This substitution in the first membrane receptor sequence allows to bring close to each other and enhance the communication between the two sequences comprised in the hybrid protein, and then to induce a best transmission of signal between the first membrane receptor activated by its ligand, and the ion channel able to generate an electrical signal.

[0200] In another advantageous embodiment, the invention relates to the use of a hybrid protein defined above, wherein said first membrane, at the C-terminus part, has a contiguous substitute sequence originating from the C-terminus of a second membrane receptor different from said first membrane receptor.

[0201] In another advantageous embodiment, the invention relates to the use of a hybrid protein above defined, comprising a tag, in particular chosen among the group consisting in:
[0202] Hemaglutinin Tag, in particular comprising or consisting in SEQ ID NO 158,
[0203] Poly Arginine Tag, in particular comprising or consisting in SEQ ID NO 160,
[0204] Poly Histidine Tag, in particular comprising or consisting in SEQ ID NO 162,
[0205] Myc Tag, in particular comprising or consisting in SEQ ID NO 164,
[0206] Strep Tag, in particular comprising or consisting in SEQ ID NO 166,
[0207] Flag Tag, in particular comprising or consisting in SEQ ID NO 168,
[0208] S-Tag, in particular comprising or consisting in SEQ ID NO 170,
[0209] HAT Tag, in particular comprising or consisting in SEQ ID NO 172,
[0210] 3× Flag Tag, in particular comprising or consisting in SEQ ID NO 174,
[0211] Calmodulin-binding peptide Tag, in particular comprising or consisting in SEQ ID NO 176,
[0212] VSVG Tag, in particular comprising or consisting in SEQ ID NO 178,
[0213] SBP Tag, in particular comprising or consisting in SEQ ID NO 180,
[0214] Chitin-binding domain Tag, in particular comprising or consisting in SEQ ID NO 182,
[0215] GST Tag, in particular comprising or consisting in SEQ ID NO 184,
[0216] Maltose-Binding protein Tag, in particular comprising or consisting in SEQ ID NO 186,
[0217] GFP Tag, in particular comprising or consisting in SEQ ID NO 188,
[0218] RFP Tag, in particular comprising or consisting in SEQ ID NO 190,
[0219] YFP Tag, in particular comprising or consisting in SEQ ID NO 192, and
[0220] CFP Tag, in particular comprising or consisting in SEQ ID NO 194.

[0221] Thus, the invention relates, in one preferred embodiment, to the use of a hybrid protein above defined, comprising a tag, in particular chosen among the group consisting in SEQ ID NO 2q, q varying from 79 to 97.

[0222] All the mentioned tags have been characterized previously, and antibodies recognizing each of them are commercially available.

[0223] In another advantageous embodiment, the invention relates to the use as defined above wherein said ion channel is chosen among:
[0224] the Kir potassium channels selected from the group comprising the potassium channels Kir1.1, Kir2.1, Kir2.2, Kir2.3, Kir2.4, Kir3.1, Kir3.2, Kir3.3, Kir3.4, Kir4.1, Kir4.2, Kir5.1, Kir6.1, Kir6.2 and Kir7.1, or
[0225] the Kv potassium channels selected from the group comprising the potassium channels Kv1.1, Kv1.2, Kv1.3, Kv1.4, Kv1.5, Kv1.6, Kv1.7, Kv1.8, Kv2.1, Kv2.2, Kv3.1, Kv3.2, Kv3.3, Kv3.4, Kv4.1, Kv4.2, Kv4.3, Kv5.1, Kv6.1, Kv6.2, Kv6.3, Kv6.4, Kv7.1, Kv7.2, Kv7.3, Kv7.4, Kv7.5, Kv8.1, Kv8.2, Kv9.1, Kv9.2, Kv9.3, Kv10.1, Kv10.2, Kv11.1, Kv11.2, Kv11.3, Kv12.1, Kv12. and Kv12.3.

[0226] In another advantageous embodiment, the invention relates to the use of a hybrid protein above-described, wherein said first and second membrane receptor sequence is the sequence of a membrane receptor belonging to the family of G-protein coupled receptors (GPCR) class A receptors.

[0227] In another advantageous embodiment, the invention relates to the use of a hybrid protein mentioned above, wherein said first and second membrane receptors are GPCR receptors chosen among the group comprising:
[0228] muscarinic receptor, in particular the human muscarinic M2 receptor, in particular comprising or constituted by SEQ ID NO 10,
[0229] adrenergic receptor, in particular the human β2-adrenergic receptor, in particular comprising or constituted by SEQ ID NO 12,
[0230] dopaminergic receptor, in particular the human dopaminergic long D2 receptor, in particular comprising or constituted by SEQ ID NO 14,
[0231] dopaminergic receptor, in particular the human dopaminergic D3 receptor, in particular comprising or constituted by SEQ ID NO 229
[0232] serotonergic receptor, in particular the human 5HT 1α receptor, in particular comprising or constituted by SEQ ID NO 16,
[0233] canabinoïd receptor, in particular the human CB 1 receptor, in particular comprising or constituted by SEQ ID NO 230

[0234] In another advantageous embodiment, the invention relates to the use of a hybrid protein described above, wherein said first and second membrane receptor sequence is the sequence of a membrane receptor belonging to the family of chemokine receptors (CR).

[0235] Chemokine receptors are cytokine receptors found on the surface of certain cells, which interact with a type of cytokine called chemokine. There have been 19 distinct chemokine receptors described in mammals. They each have a 7 transmembrane (7TM) structure and are coupled to G-protein for signal transduction within a cell, making them members of a large protein family of G protein-coupled receptors. Following interaction with their specific chemokine ligands, chemokine receptors trigger an increase in intracellular calcium (Ca2+) ions (calcium signaling) within the cell. This causes cell responses, including the onset of a process known as chemotaxis that traffics the cell to a desired location within the organism. Chemokine receptors are divided into different families, CXC chemokine receptors, CC chemokine receptors, CX3C chemokine receptors and XC chemokine receptors that correspond to the 4 distinct subfamilies of chemokines they bind.

[0236] In another advantageous embodiment, the invention relates to the use of a hybrid protein defined above, wherein said chemokine receptor is chosen among the group comprising:
[0237] CXCR4 receptor, in particular the human CXCR4 receptor, in particular comprising or constituted by SEQ ID NO 18,
[0238] CCR5 receptor, in particular the human CCR5 receptor, in particular comprising or constituted by SEQ ID NO 20, and
[0239] CCR2 receptor, in particular the human CCR2 receptor, in particular comprising or constituted by SEQ ID NO 231.

[0240] In a specific embodiment, the invention relates to specific hybrid fusion proteins as mentioned above and detailed in the following Table ibis:

TABLE 1
bis represents all the hybrids proteins disclosed and used in the invention. Membrane receptor part of the hybrid protein is
indicated in grey, and ion channel part of the hybrid protein is indicated in white. -ΔN refers to the deletion of the N terminus part of
the ion channel.

[chemical structure]

[chemical structure]

[0241] In another advantageous embodiment, the invention relates to the use as defined above wherein said ion channel is Kir6.2.

[0242] Kir6.2 is a ATP dependent potassium channel (K_{ATP} channel), relatively simple, well-studied K⁺ channel that has the unique signature of being inhibited by intracellular ATP. This convenient feature provides a straightforward means to identify the channel and control its open probability [Moreau C, Prost A L, Derand R, Vivaudou M (2005) SUR, ABC proteins targeted by K_{ATP} channel openers. J Mol Cell Cardiol. 38:951-63; Nichols C G (2006) K_{ATP} channels as molecular sensors of cellular metabolism. Nature. 440:470-6].

[0243] In another advantageous embodiment, the invention relates to the use of a hybrid protein defined above, wherein said ion channel is the murine or human Kir6.2, and in particular comprises or is constituted by the amino acid sequence SEQ ID NO 2.

[0244] Preferably in the invention the hybrid protein comprises or is constituted by the murine Kir6.2 as ion channel part.

[0245] In another advantageous embodiment, the invention relates to the use of a hybrid protein defined above comprising:

1—a membrane receptor sequence, in its natural configuration, fused to the N-terminus deleted sequence of Kir6.2, or
2—a membrane receptor sequence, in its natural configuration, fused to a linker sequence, said linker sequence being fused to the N-terminus deleted sequence of Kir6.2, or
3—a membrane receptor sequence, deleted in its C-terminus part, fused to the N-terminus deleted sequence of Kir6.2, or
4—a membrane receptor sequence, deleted in its C-terminus part, fused to a linker sequence, said linker sequence being fused to the N-terminus deleted sequence of Kir6.2, or
5—a membrane receptor sequence, having an addition at the C-terminus of an additional sequence from a second membrane receptor, fused to the N-terminus deleted sequence of Kir6.2, or
6—a membrane receptor sequence, having an addition at the C-terminus of an additional sequence from a second membrane receptor, fused to a linker sequence, said linker sequence being fused to the N-terminus deleted sequence of Kir6.2, or
7—a membrane receptor sequence, having a substitution at the C-terminus with a substitution sequence from a second membrane receptor, fused to the N-terminus deleted sequence of Kir6.2, or
8—a membrane receptor sequence, having an substitution at the C-terminus with a substitution sequence from a second membrane receptor, fused to the N-terminus deleted sequence of Kir6.2, fused to a linker sequence, said linker sequence being fused to the N-terminus deleted sequence of Kir6.2.

[0246] In another advantageous embodiment, the invention relates to the use of a hybrid protein defined above, wherein the Kir6.2 ion channel sequence is deleted in the C-terminus part, in particular deleted from 1 to 36 of its 36 last amino acids at the C-terminus, and in particular comprises or is constituted by the amino acid sequence SEQ ID NO 4.

[0247] Preferably in the invention the hybrid protein comprises or is constituted by the murine Kir6.2 ion channel as ion channel part, wherein 26, or 36 amino acids have been deleted of the C-terminus part of said Kir6.2 ion channel (include endoplasmic retention signal (RKR) mutations) [Zerangue N, Schwappach B, Jan Y N, Jan L Y (1999) A new ER trafficking signal regulates the subunit stoichiometry of plasma membrane K_{ATP} channels. Neuron. 22:537-48]. The 2 to 36 amino acids deleted are preferably contiguous. This deletion preferably begin at position 354 of the amino acid sequence of the mouse Kir6.2 protein. The endosplamic retention signal can also be abolished by single or multiple substitutions of the amino acids (RKR) by all other type of residues.

[0248] In another advantageous embodiment, the invention relates to the use of a hybrid protein defined above, wherein the sequence of the Kir6.2 ion channel sequence contains an insertion of 11 amino acids, preferably contiguous, in the external loop of said Kir6.2, and in particular comprises or is constituted by SEQ ID NO 6 or by SEQ ID NO 8.

[0249] According to the invention, the hybrid protein comprises or is constituted by the murine Kir6.2 ion channel as ion channel part wherein 11 amino acids have been inserted in the external loop of Kir6.2. The external loop is represented in FIG. 2. The external loop is defined by the amino acids comprised between the positions 91 to 119. The numbering is defined from the sequence of Kir6.2 in its natural configuration, as mentioned above. This fragment of Kir6.2 corresponds to the following sequence:

(SEQ ID NO 232)
91-WLIAFAHGDLAPGEGTNVPCVTSIHSFSS-119.

[0250] When the 11 amino acids sequence is inserted into the loop sequence, the sequence becomes:

(SEQ ID NO 233)
91-WLIAFAHGDLYAYMEKGITDLAPGEGTNVPCVTSIHSFSS-130.

[0251] This region corresponds also to the region wherein the tag sequence above-mentioned can be inserted. The tag sequence and/or 11-amino acids insertion in the external loop of Kir6.2 protein enhances the size of external loop. It allows to provide a best accessibility to antibodies able to detect either external loop sequence, or tag sequence.

[0252] The tag insertion and/or 11-amino acids insertion does not modify the conformation of ion channel, and said ion channel remains able to generate, with the same ability as the ion channel in its natural configuration, an electrical current.

[0253] In one particular embodiment of the invention, when the HA tag sequence (SEQ ID NO 158) is inserted in the amino acid sequence of the loop containing the 11 amino acids insertion (SEQ ID NO 198), the sequence becomes:

(SEQ ID NO 234)
91-WLIAFAHGDLYAYMEKGITDLAPYPYDVPDYAGEGTNVPCVTSIH
SFSS-139.

[0254] In another advantageous embodiment, the invention relates to the use of a hybrid protein described above, wherein said hybrid protein is chosen among the group consisting in SEQ ID NO 2q, q varying from 15 to 70 and from 99 to 102.

[0255] By SEQ ID NO 2q, q varying from 15 to 70, it is means all the following sequences: SEQ ID NO 30, SEQ ID NO 32, SEQ ID NO 34, SEQ ID NO 36, SEQ ID NO 38, SEQ ID NO 40, SEQ ID NO 42, SEQ ID NO 44, SEQ ID NO 46, SEQ ID NO 48, SEQ ID NO 50, SEQ ID NO 52, SEQ ID NO 54, SEQ ID NO 56, SEQ ID NO 58, SEQ ID NO 60, SEQ ID NO 62, SEQ ID NO 64, SEQ ID NO 66, SEQ ID NO 68, SEQ ID NO 70, SEQ ID NO 72, SEQ ID NO 74, SEQ ID NO 76, SEQ ID NO 78, SEQ ID NO 80, SEQ ID NO 82, SEQ ID NO 84, SEQ ID NO 86, SEQ ID NO 88, SEQ ID NO 90, SEQ ID NO 92, SEQ ID NO 94, SEQ ID NO 96, SEQ ID NO 98, SEQ ID NO 100, SEQ ID NO 102, SEQ ID NO 104, SEQ ID NO 106, SEQ ID NO 108, SEQ ID NO 110, SEQ ID NO 112, SEQ ID NO 114, SEQ ID NO 116, SEQ ID NO 118, SEQ ID NO 120, SEQ ID NO 122, SEQ ID NO 124, SEQ ID NO 126, SEQ ID NO 128, SEQ ID NO 130, SEQ ID NO 132, SEQ ID NO 134, SEQ ID NO 136, SEQ ID NO 138 and SEQ ID NO 140.

[0256] The above mentioned sequences correspond to particular constructions, the characteristics of which are indicated in the following table 1.

| Construct name | TAG | Δ C-RM | Add C-RM | Δ N-Kir | Add +11 ELoop | Δ C Kir | Protein NO |
|---|---|---|---|---|---|---|---|
| M2-KΔ 0 0 + 6G HA | Y (HA) | No | No | No | Y | Y | SEQ ID NO 22 |
| M2-K 0 0 + 6G HA | Y (HA) | No | No | No | Y | No | SEQ ID NO 24 |
| M2-K 0 0 + 6G | No | No | No | No | No | No | SEQ ID NO 26 |
| M2-KΔ 0 0 + 6G | No | No | No | No | No | Y | SEQ ID NO 28 |
| M2-KΔ 0 − 20 HA | Y (HA) | No | No | Y (−20) | Y | Y | SEQ ID NO 30 |
| M2-K 0 − 20 HA | Y (HA) | No | No | Y (−20) | Y | No | SEQ ID NO 32 |
| M2-K 0 − 20 | No | No | No | Y (−20) | No | No | SEQ ID NO 34 |
| M2-KΔ 0 − 20 | No | No | No | Y (−20) | No | Y | SEQ ID NO 36 |
| M2-KΔ −5 − 20 HA | Y (HA) | Y (−5) | No | Y (−20) | Y | Y | SEQ ID NO 38 |
| M2-K −5 − 20 HA | Y (HA) | Y (−5) | No | Y (−20) | Y | No | SEQ ID NO 40 |
| M2-K −5 − 20 | No | Y (−5) | No | Y (−20) | No | No | SEQ ID NO 42 |
| M2-KΔ −5 − 20 | No | Y (−5) | No | Y (−20) | No | Y | SEQ ID NO 44 |
| M2-KΔ 0 − 25 HA | Y (HA) | No | No | Y (−25) | Y | Y | SEQ ID NO 46 |
| M2-K 0 − 25 HA | Y (HA) | No | No | Y (−25) | Y | No | SEQ ID NO 48 |
| M2-K 0 − 25 | No | No | No | Y (−25) | No | No | SEQ ID NO 50 |
| M2-KΔ 0 − 25 | No | No | No | Y (−25) | No | Y | SEQ ID NO 52 |
| M2-KΔ 0 − 30 HA | Y (HA) | No | No | Y (−30) | Y | Y | SEQ ID NO 54 |
| M2-K 0 − 30 HA | Y (HA) | No | No | Y (−30) | Y | No | SEQ ID NO 56 |
| M2-K 0 − 30 | No | No | No | Y (−30) | No | No | SEQ ID NO 58 |
| M2-KΔ 0 − 30 | No | No | No | Y (−30) | No | Y | SEQ ID NO 60 |
| D2-KΔ 0 − 25 HA | Y (HA) | No | No | Y (−25) | Y | Y | SEQ ID NO 62 |
| D2-K 0 − 25 HA | Y (HA) | No | No | Y (−25) | Y | No | SEQ ID NO 64 |
| D2-K 0 − 25 | No | No | No | Y (−25) | No | No | SEQ ID NO 66 |
| D2-KΔ 0 − 25 | No | No | No | Y (−25) | No | Y | SEQ ID NO 68 |
| D2-KΔ 0 − 16 HA | Y (HA) | No | No | Y (−16) | Y | Y | SEQ ID NO 70 |
| D2-K 0 − 16 HA | Y (HA) | No | No | Y (−16) | Y | No | SEQ ID NO 72 |
| D2-K 0 − 16 | No | No | No | Y (−16) | No | No | SEQ ID NO 74 |
| D2-KΔ 0 − 16 | No | No | No | Y (−16) | No | Y | SEQ ID NO 76 |
| D2-KΔ +9_{M2} − 25 HA | Y (HA) | No | Y (+9-M2) | Y (−25) | Y | Y | SEQ ID NO 78 |
| D2-K +9_{M2} − 25 HA | Y (HA) | No | Y (+9-M2) | Y (−25) | Y | No | SEQ ID NO 80 |
| D2-K +9_{M2} − 25 | No | No | Y (+9-M2) | Y (−25) | No | No | SEQ ID NO 82 |
| D2-KΔ +9_{M2} − 25 | No | No | Y (+9-M2) | Y (−25) | No | Y | SEQ ID NO 84 |
| D2-KΔ 0 − 30 HA | Y (HA) | No | No | Y (−30) | Y | Y | SEQ ID NO 86 |
| D2-K 0 − 30 HA | Y (HA) | No | No | Y (−30) | Y | No | SEQ ID NO 88 |
| D2-K 0 − 30 | No | No | No | Y (−30) | No | No | SEQ ID NO 90 |
| D2-KΔ 0 − 30 | No | No | No | Y (−30) | No | Y | SEQ ID NO 92 |
| D3-KΔ 0 − 25 HA | Y (HA) | No | No | Y (−25) | Y | Y | SEQ ID NO 204 |
| B2-K 0 − 25 HA | Y (HA) | No | No | Y (−25) | Y | No | SEQ ID NO 94 |
| B2-KΔ 0 − 25 | No | No | No | Y (−25) | No | Y | SEQ ID NO 96 |
| B2-K 0 − 25 | No | No | No | Y (−25) | No | No | SEQ ID NO 98 |
| B2-KΔ 0 − 25 HA | Y (HA) | No | No | Y (−25) | Y | Y | SEQ ID NO 100 |
| B2-K −63 − 25 HA | Y (HA) | Y (−63) | No | Y (−25) | Y | No | SEQ ID NO 102 |
| B2-KΔ −63 − 25 HA | Y (HA) | Y (−63) | No | Y (−25) | Y | Y | SEQ ID NO 104 |
| B2-K −63 − 25 | No | Y (−63) | No | Y (−25) | No | No | SEQ ID NO 106 |
| B2-KΔ −63 − 25 | No | Y (−63) | No | Y (−25) | No | Y | SEQ ID NO 108 |
| B2-K 0 − 30 HA | Y (HA) | No | No | Y (−30) | Y | No | SEQ ID NO 110 |
| B2-KΔ 0 − 30 HA | Y (HA) | No | No | Y (−30) | Y | Y | SEQ ID NO 112 |
| B2-K 0 − 30 | No | No | No | Y (−30) | No | No | SEQ ID NO 114 |
| B2-KΔ 0 − 30 | No | No | No | Y (−30) | No | Y | SEQ ID NO 116 |
| B2-KΔ −73 − 25 HA | Y (HA) | Y (−73) | No | Y (−25) | Y | Y | SEQ ID NO 198 |
| 5HT1a-K 0 − 25 HA | Y (HA) | No | No | Y (−25) | Y | No | SEQ ID NO 118 |
| 5HT1a-KΔ 0 − 25 HA | Y (HA) | No | No | Y (−25) | Y | Y | SEQ ID NO 120 |
| 5HT1a-K 0 − 25 | No | No | No | Y (−25) | No | No | SEQ ID NO 122 |
| 5HT1a- KΔ 0 − 25 | No | No | No | Y (−25) | No | Y | SEQ ID NO 124 |
| 5HT1a-K +4_{M2} − 25 HA | Y (HA) | No | Y (+4-M2) | Y (−25) | Y | No | SEQ ID NO 126 |
| 5HT1a-KΔ +4_{M2} − 25 HA | Y (HA) | No | Y (+4-M2) | Y (−25) | Y | Y | SEQ ID NO 128 |
| 5HT1a-K +4_{M2} − 25 | No | No | Y (+4-M2) | Y (−25) | No | No | SEQ ID NO 130 |
| 5HT1a-KΔ +4_{M2} − 25 | No | No | Y (+4-M2) | Y (−25) | No | Y | SEQ ID NO 132 |
| 5HT1a-K 0 − 30 HA | Y (HA) | No | No | Y (−30) | Y | No | SEQ ID NO 134 |
| 5HT1a-KΔ 0 − 30 HA | Y (HA) | No | No | Y (−30) | Y | Y | SEQ ID NO 136 |
| 5HT1a-K 0 − 30 | No | No | No | Y (−30) | No | No | SEQ ID NO 138 |
| 5HT1a-KΔ 0 − 30 | No | No | No | Y (−30) | No | Y | SEQ ID NO 140 |
| CB1-KΔ 0 − 25 HA | Y (HA) | No | No | Y (−25) | Y | Y | SEQ ID NO 200 |
| CB1-KΔ −48 − 25 HA | Y (HA) | Y (−48) | No | Y (−25) | Y | Y | SEQ ID NO 202 |

Table 1 describes the characteristics of the hybrid proteins described in the invention. Y means Yes and corresponds to the presence of the above mentioned element, No corresponds to the absence of the above mentioned element. Y (−X) means that X amino acids have been deleted. Y (+X − Z) means that X amino acids have been added, said X amino acids originating from the Z protein.
TAG indicates the presence of a TAG sequence in the external loop of Kir6.2 sequence. Δ C-RM indicates the presence or absence of a deletion in the C-terminus part of membrane receptor. Add C-RM indicates the presence or absence of an additional sequence to the C-terminus part of membrane receptor. Δ C Kir indicates the presence or absence of 36 amino acids in the C-terminus of Kir6.2 sequence. Add +11 ELoop indicates the presence of an addition of 11 amino acids in the external loop of Kir6.2 sequence. Δ N-Kir indicates the presence or absence of a deletion in the N-terminus part of Kir6.2. M2 means muscarinic receptor, D2 means dopaminergic receptor D2, D3 means dopaminergic receptor D3, B2 means β2-adrenergic receptor, 5HT1a means 5HT1α receptor and CB1 means CB1 canabinoid receptor.

[0257] In another embodiment, the invention relates to the use of a hybrid protein defined above, wherein said hybrid protein is chosen among the group consisting in SEQ ID NO 2q, q varying from 71 to 78 and SEQ ID NO 206.

[0258] By SEQ ID NO 2q, q varying from 71 to 78, it is defined in the invention the following sequences: SEQ ID NO 142, SEQ ID NO 144, SEQ ID NO 146, SEQ ID NO 148, SEQ ID NO 150, SEQ ID NO 152, SEQ ID NO 154 and SEQ ID NO 156.

[0259] The above mentioned sequences correspond to particular constructions, the characteristics of which are indicated in the following table 2.

| Construct name | TAG | Δ C-RM | Add C-RM | Δ N-Kir | Add +11 ELoop | Δ C Kir | Protein NO |
|---|---|---|---|---|---|---|---|
| CXCR4-K 0 − 25 HA | Y (HA) | No | No | Y (−25) | Y | No | SEQ ID NO 142 |
| CXCR4-KΔ 0 − 25 HA | Y (HA) | No | No | Y (−25) | Y | Y | SEQ ID NO 144 |
| CXCR4-K 0 − 25 | No | No | No | Y (−25) | No | No | SEQ ID NO 146 |
| CXCR4-KΔ 0 − 25 | No | No | No | Y (−25) | No | Y | SEQ ID NO 148 |
| CCR5-K 0 − 25 HA | Y (HA) | No | No | Y (−25) | Y | No | SEQ ID NO 150 |
| CCR5-KΔ 0 − 25 HA | Y (HA) | No | No | Y (−25) | Y | Y | SEQ ID NO 152 |
| CCR5-K 0 − 25 | No | No | No | Y (−25) | No | No | SEQ ID NO 154 |
| CCR5-KΔ 0 − 25 | No | No | No | Y (−25) | No | Y | SEQ ID NO 156 |
| CCR2-KΔ 0 − 25 HA | Y (HA) | No | No | Y (−25) | Y | Y | SEQ ID NO 206 |

Table 2 describes the characteristics of the hybrid proteins described in the invention. Y means Yes.
TAG indicates the presence of a TAG sequence in the external loop of Kir6.2 sequence. Δ C-RM indicates the presence or absence of a deletion in the C-terminus part of membrane receptor. Add C-RM indicates the presence or absence of an additional sequence to the C-terminus part of membrane receptor. Δ C Kir indicates the presence or absence of 36 amino acids in the C-terminus of Kir6.2 sequence. Add +11 ELoop indicates the presence of an addition of 11 amino acids in the external loop of Kir6.2 sequence. Δ N-Kir indicates the presence or absence of a deletion in the N-terminus part of Kir6.2. CXCR4 means CXCR4 receptor, CCR5 means CCR5 receptor and CCR2 means CCR2 receptor.

[0260] In another preferred embodiment, the invention relates to the use of a hybrid protein above defined, wherein said hybrid protein is chosen among the group consisting in SEQ ID NO 32, SEQ ID NO 40, SEQ ID NO 48, SEQ ID NO 56, SEQ ID NO 64, SEQ ID NO 72, SEQ ID NO 80, SEQ ID NO 88 and SEQ ID NO 94.

[0261] In another embodiment, the invention relates to the use of a hybrid protein defined above, said hybrid protein being inserted in a membrane, preferably a membrane comprising lipids.

[0262] According to the invention, “membrane” is defined as a compound separating two conditions.

[0263] Usually, membrane consists of polymers and permits selective transport of material. Membrane may contain auxiliary parts for mechanical support.

[0264] The driving force of the material transport is given by concentration, pressure, electrical or chemical gradient across the membrane.

[0265] The applications depend on the type of functionality incorporated in the membrane, which can be based on size-exclusion, chemical affinity or electrostatics.

[0266] In the invention said membrane does not allow the passive diffusion of ions, and the ionic concentration gradient establishes a potential differential, which allows the current generation.

[0267] Also according to the invention, the membrane can be a biological membrane.

[0268] A biological membrane or biomembrane is an enclosing or separating amphipathic layer that acts as a barrier within or around a cell. It is, almost invariably, a lipid bilayer, composed of a double layer of lipid-class molecules, specifically phospholipids, with occasional proteins intertwined, some of which function as channels.

[0269] Such membranes typically define enclosed spaces or compartments in which cells may maintain a chemical or biochemical environment that differs from the outside.

[0270] The most important feature of a biomembrane is that it is a selectively-permeable structure. This means that the size, charge, and other chemical properties of the atoms and molecules attempting to cross it will determine whether they succeed in doing so. Selective permeability is essential for effective separation of a cell from its surroundings. Biological membranes also have certain mechanical or elastic properties.

[0271] If a particle is too large or otherwise unable to cross the membrane by itself, but is still needed by a cell, it could go through one of the protein channels for example.

[0272] The hybrid protein according to the invention is prepared from host cells expressing the hybrid protein as defined above, by using standard recombinant protein expression techniques, which are well-known in the art. Alternatively, the hybrid protein is purified and incorporated in an artificial membrane, by using standard techniques as described for example in Silvius J R, 1992, Annu. Rev. Biophys. Biomol. Struct., 21, 323-348.

[0273] In another particular embodiment, the invention relates to the use of a nucleic acid molecule coding for a hybrid protein defined above.

[0274] Particularly in one embodiment, the invention relates to the use of nucleic acid molecules as defined above, wherein said nucleic molecules have a nucleic acid sequence chosen among the group consisting SEQ ID NO 2q-1, q varying from 15 to 78 and from 99 to 103.

[0275] Said nucleic acid sequences defined above by SEQ ID NO 2q-1, q varying from 15 to 78, correspond to the following sequences: SEQ ID NO 29, SEQ ID NO 31, SEQ ID NO 33, SEQ ID NO 35, SEQ ID NO 37, SEQ ID NO 39, SEQ ID NO 41, SEQ ID NO 43, SEQ ID NO 45, SEQ ID NO 47, SEQ ID NO 49, SEQ ID NO 51, SEQ ID NO 53, SEQ ID NO 55, SEQ ID NO 57, SEQ ID NO 59, SEQ ID

[0276] NO 61, SEQ ID NO 63, SEQ ID NO 65, SEQ ID NO 67, SEQ ID NO 69, SEQ ID NO 71, SEQ ID NO 73, SEQ ID NO 75, SEQ ID NO 77, SEQ ID NO 79, SEQ ID NO 81, SEQ ID NO 83, SEQ ID NO 85, SEQ ID NO 87, SEQ ID NO 89, SEQ ID NO 91, SEQ ID NO 93, SEQ ID NO 95, SEQ ID NO 97, SEQ ID NO 99, SEQ ID NO 101, SEQ ID NO 103, SEQ ID NO 105, SEQ ID NO 107, SEQ ID NO 109, SEQ ID NO 111, SEQ ID NO 113, SEQ ID NO 115, SEQ ID NO 117, SEQ ID NO 119, SEQ ID NO 121, SEQ ID NO 123, SEQ ID NO 125, SEQ ID NO 127, SEQ ID NO 129, SEQ ID NO 131, SEQ ID NO 133, SEQ ID NO 135, SEQ ID NO 137, SEQ ID NO 139, SEQ ID NO 141, SEQ ID NO 143, SEQ ID NO 145, SEQ ID NO 147, SEQ ID NO 149, SEQ ID NO 151, SEQ ID NO 153 and SEQ ID NO 155 and SEQ ID NO 197, SEQ ID NO 199, SEQ ID NO 201, SEQ ID NO 203 and SEQ ID NO 205

[0277] These nucleic acid sequences are defined such as the protein with amino acid sequence SEQ ID NO 30 is coded by the nucleic acid molecule having the sequence SEQ ID NO 29, the protein with amino acid sequence SEQ ID NO 32 is coded by the nucleic acid molecule having the sequence SEQ ID NO 31, the protein with amino acid sequence SEQ ID NO 34 is coded by the nucleic acid molecule having the sequence SEQ ID NO 33, etc. . . .

[0278] The following table 3 recapitulate the correspondence between protein sequence and their coding sequence. The name of protein or peptide is also indicated.

| Construct name | Protein NO | DNA NO |
|---|---|---|
| mouse Kir6.2 channel | SEQ ID NO 2 | SEQ ID NO 1 |
| mouse Kir6.2 channel Δ36 | SEQ ID NO 4 | SEQ ID NO 3 |
| mouse Kir6.2 channel + 11 | SEQ ID NO 6 | SEQ ID NO 5 |
| mouse Kir6.2 channel + 11 Δ36 | SEQ ID NO 8 | SEQ ID NO 7 |
| human M2 Muscarinic receptor | SEQ ID NO 10 | SEQ ID NO 9 |
| human β2 Adrenergic receptor | SEQ ID NO 12 | SEQ ID NO 11 |
| human long D2 Dopaminergic | SEQ ID NO 14 | SEQ ID NO 13 |
| receptor | | |
| human 5HT1α Serotoninergic | SEQ ID NO 16 | SEQ ID NO 15 |
| receptor | | |
| human CXCR4 Chemokine | SEQ ID NO 18 | SEQ ID NO 17 |
| receptor | | |
| human CCR5 Chemokine | SEQ ID NO 20 | SEQ ID NO 19 |
| receptor | | |
| M2-KΔ 0 0 + 6G HA | SEQ ID NO 22 | SEQ ID NO 21 |
| M2-K 0 0 + 6G HA | SEQ ID NO 24 | SEQ ID NO 23 |
| M2-K 0 0 + 6G | SEQ ID NO 26 | SEQ ID NO 25 |
| M2-KΔ 0 0 + 6G | SEQ ID NO 28 | SEQ ID NO 27 |
| M2-KΔ 0 − 20 HA | SEQ ID NO 30 | SEQ ID NO 29 |
| M2-K 0 − 20 HA | SEQ ID NO 32 | SEQ ID NO 31 |
| M2-K 0 − 20 | SEQ ID NO 34 | SEQ ID NO 33 |
| M2-KΔ 0 − 20 | SEQ ID NO 36 | SEQ ID NO 35 |
| M2-KΔ −5 − 20 HA | SEQ ID NO 38 | SEQ ID NO 37 |
| M2-K −5 − 20 HA | SEQ ID NO 40 | SEQ ID NO 39 |
| M2-K −5 − 20 | SEQ ID NO 42 | SEQ ID NO 41 |
| M2-KΔ −5 − 20 | SEQ ID NO 44 | SEQ ID NO 43 |
| M2-KΔ 0 − 25 HA | SEQ ID NO 46 | SEQ ID NO 45 |
| M2-K 0 − 25 HA | SEQ ID NO 48 | SEQ ID NO 47 |
| M2-K 0 − 25 | SEQ ID NO 50 | SEQ ID NO 49 |
| M2-KΔ 0 − 25 | SEQ ID NO 52 | SEQ ID NO 51 |
| M2-KΔ 0 − 30 HA | SEQ ID NO 54 | SEQ ID NO 53 |
| M2-K 0 − 30 HA | SEQ ID NO 56 | SEQ ID NO 55 |
| M2-K 0 − 30 | SEQ ID NO 58 | SEQ ID NO 57 |
| M2-KΔ 0 − 30 | SEQ ID NO 60 | SEQ ID NO 59 |
| D2-KΔ 0 − 25 HA | SEQ ID NO 62 | SEQ ID NO 61 |
| D2-K 0 − 25 HA | SEQ ID NO 64 | SEQ ID NO 63 |
| D2-K 0 − 25 | SEQ ID NO 66 | SEQ ID NO 65 |
| D2-KΔ 0 − 25 | SEQ ID NO 68 | SEQ ID NO 67 |
| D2-KΔ 0 − 16 HA | SEQ ID NO 70 | SEQ ID NO 69 |
| D2-K 0 − 16 HA | SEQ ID NO 72 | SEQ ID NO 71 |
| D2-K 0 − 16 | SEQ ID NO 74 | SEQ ID NO 73 |
| D2-KΔ 0 − 16 | SEQ ID NO 76 | SEQ ID NO 75 |
| D2-KΔ +9_{M2} − 25 HA | SEQ ID NO 78 | SEQ ID NO 77 |
| D2-K +9_{M2} − 25 HA | SEQ ID NO 80 | SEQ ID NO 79 |
| D2-K +9_{M2} − 25 | SEQ ID NO 82 | SEQ ID NO 81 |
| D2-KΔ +9_{M2} − 25 | SEQ ID NO 84 | SEQ ID NO 83 |
| D2-KΔ 0 − 30 HA | SEQ ID NO 86 | SEQ ID NO 85 |
| D2-K 0 − 30 HA | SEQ ID NO 88 | SEQ ID NO 87 |
| D2-K 0 − 30 | SEQ ID NO 90 | SEQ ID NO 89 |
| D2-KΔ 0 − 30 | SEQ ID NO 92 | SEQ ID NO 91 |
| B2-K 0 − 25 HA | SEQ ID NO 94 | SEQ ID NO 93 |
| B2-KΔ 0 − 25 | SEQ ID NO 96 | SEQ ID NO 95 |
| B2-K 0 − 25 | SEQ ID NO 98 | SEQ ID NO 97 |
| B2-KΔ 0 − 25 HA | SEQ ID NO 100 | SEQ ID NO 99 |
| B2-K −63 − 25 HA | SEQ ID NO 102 | SEQ ID NO 101 |
| B2-KΔ −63 − 25 HA | SEQ ID NO 104 | SEQ ID NO 103 |
| B2-K −63 − 25 | SEQ ID NO 106 | SEQ ID NO 105 |
| B2-KΔ −63 − 25 | SEQ ID NO 108 | SEQ ID NO 107 |
| B2-K 0 − 30 HA | SEQ ID NO 110 | SEQ ID NO 109 |
| B2-KΔ 0 − 30 HA | SEQ ID NO 112 | SEQ ID NO 111 |
| B2-K 0 − 30 | SEQ ID NO 114 | SEQ ID NO 113 |
| B2-KΔ 0 − 30 | SEQ ID NO 116 | SEQ ID NO 115 |
| 5HT1a-K 0 − 25 HA | SEQ ID NO 118 | SEQ ID NO 117 |
| 5HT1a-KΔ 0 − 25 HA | SEQ ID NO 120 | SEQ ID NO 119 |
| 5HT1a-K 0 − 25 | SEQ ID NO 122 | SEQ ID NO 121 |
| 5HT1a-KΔ 0 − 25 | SEQ ID NO 124 | SEQ ID NO 123 |
| 5HT1a-K +4_{M2} − 25 HA | SEQ ID NO 126 | SEQ ID NO 125 |
| 5HT1a-KΔ +4_{M2} − 25 HA | SEQ ID NO 128 | SEQ ID NO 127 |
| 5HT1a-K +4_{M2} − 25 | SEQ ID NO 130 | SEQ ID NO 129 |
| 5HT1a-KΔ +4_{M2} − 25 | SEQ ID NO 132 | SEQ ID NO 131 |
| 5HT1a-K 0 − 30 HA | SEQ ID NO 134 | SEQ ID NO 133 |
| 5HT1a-KΔ 0 − 30 HA | SEQ ID NO 136 | SEQ ID NO 135 |
| 5HT1a-K 0 − 30 | SEQ ID NO 138 | SEQ ID NO 137 |
| 5HT1a-KΔ 0 − 30 | SEQ ID NO 140 | SEQ ID NO 139 |
| CXCR4-K 0 − 25 HA | SEQ ID NO 142 | SEQ ID NO 141 |
| CXCR4-KΔ 0 − 25 HA | SEQ ID NO 144 | SEQ ID NO 143 |
| CXCR4-K 0 − 25 | SEQ ID NO 146 | SEQ ID NO 145 |
| CXCR4-KΔ 0 − 25 | SEQ ID NO 148 | SEQ ID NO 147 |
| CCR5-K 0 − 25 HA | SEQ ID NO 150 | SEQ ID NO 149 |
| CCR5-KΔ 0 − 25 HA | SEQ ID NO 152 | SEQ ID NO 151 |
| CCR5-K 0 − 25 | SEQ ID NO 154 | SEQ ID NO 153 |
| CCR5-KΔ 0 − 25 | SEQ ID NO 156 | SEQ ID NO 155 |
| Hemaglutinin (HA) | SEQ ID NO 158 | SEQ ID NO 157 |
| Poly-Arginine (5-6, usually 5) | SEQ ID NO 160 | SEQ ID NO 159 |
| Poly-Histidine (2-10, usually 6) | SEQ ID NO 162 | SEQ ID NO 161 |
| c-Myc | SEQ ID NO 164 | SEQ ID NO 163 |
| Strep-tag II | SEQ ID NO 166 | SEQ ID NO 165 |
| Flag | SEQ ID NO 168 | SEQ ID NO 167 |
| S-tag | SEQ ID NO 170 | SEQ ID NO 169 |
| HAT- | SEQ ID NO 172 | SEQ ID NO 171 |
| 3x FLAG | SEQ ID NO 174 | SEQ ID NO 173 |
| Calmodulin-binding peptide | SEQ ID NO 176 | SEQ ID NO 175 |
| VSVG | SEQ ID NO 178 | SEQ ID NO 177 |
| SBP | SEQ ID NO 180 | SEQ ID NO 179 |
| Chitin-binding domain | SEQ ID NO 182 | SEQ ID NO 181 |
| Glutathione S-transferase | SEQ ID NO 184 | SEQ ID NO 183 |
| Maltose-binding protein | SEQ ID NO 186 | SEQ ID NO 185 |
| GFP | SEQ ID NO 188 | SEQ ID NO 187 |
| RFP | SEQ ID NO 190 | SEQ ID NO 189 |
| YFP | SEQ ID NO 192 | SEQ ID NO 191 |
| CFP | SEQ ID NO 194 | SEQ ID NO 193 |
| Poly Glu | SEQ ID NO 196 | SEQ ID NO 195 |
| B2-KΔ −73 − 25 HA | SEQ ID NO 198 | SEQ ID NO 197 |
| CB1-KΔ 0 − 25 HA | SEQ ID NO 200 | SEQ ID NO 199 |
| CB1-KΔ −48 − 25 HA | SEQ ID NO 202 | SEQ ID NO 201 |
| D3-KΔ 0 − 25 HA | SEQ ID NO 204 | SEQ ID NO 203 |
| CCR-KΔ 0 − 25 HA | SEQ ID NO 206 | SEQ ID NO 205 |

Table 3 indicates the correspondence between protein and coding sequence (DNA)

[0279] In another particular embodiment, the invention relates to the use of a vector comprising a nucleic acid molecule mentioned above, and comprising elements allowing the expression of said nucleic acid molecule in host cells.

[0280] By “elements allowing the expression of said nucleic acid molecule” it is meant in the invention nucleic acid sequences such as, promoter, terminator, polyadenylation sites and all the necessary sequence that are needed for a correct expression in cell.

[0281] Vectors of the invention are preferably expression vectors, wherein a sequence encoding a hybrid protein of the invention is placed under control of appropriate transcriptional and translational control elements. These vectors may be obtained and introduced in a host cell by the well-known recombinant DNA and genetic engineering techniques.

[0282] In another advantageous embodiment, the invention relates to the use of a vector defined above, wherein said host cells are chosen among bacteria, yeast, mammalian cells, insect cells or amphibian oocytes.

[0283] Preferably bacteria are E. coli. Preferred yeast in the invention is, but is not limited to, S. cerevisiae or Sc. pombe or Pichia pastoris. Mammalian cells are defined in the invention by all the mammalian cell lines commonly used in the art, for in vivo experiments, such as human cell lines, murine cell lines, rodent cell lines . . . .

[0284] Said host cell may be obtained by transfection with the hybrid protein, the polynucleotide (DNA, RNA) encoding said hybrid protein, or with the expression vector comprising said polynucleotide, as defined above.

[0285] The invention also relates to a hybrid protein comprising the sequence of a first membrane receptor fused at its C-terminus to the N-terminus of an ion channel, and possibly containing a linker between the C-terminus of said first membrane receptor and the N-terminus part of said ion channel, said linker being absent in the natural configuration of said first membrane receptor and said ion channel,
[0286] said ion channel sequence being deleted of a number of amino acids ranging from 1 to the total number of amino acids of the region extending from the first amino acid at the N-terminus part of said ion channel to the first amino acids of the first α-helix of the transmembrane domain of said ion channel, possibly containing a tag sequence,
[0287] said first membrane receptor being liable to present in its extracellular domain a mutation allowing the specific interaction with a ligand different from the ligand that interacts with the first membrane receptor in its natural configuration,
[0288] said first membrane receptor being liable to present in its cytoplasmic tail, said cytoplasmic tail being a sequence extending from the last amino acids after the transmembrane domain to the last amino acid of said first membrane receptor,
   [0289] a) a deletion of a number of amino acids ranging from 1 to the total number of amino acids of the region delimited by the cytoplasmic tail, preferably of a number of amino acids ranging from 1 to 20, preferably of a number of amino acids ranging from 1 to 15, more preferably of a number of amino acids ranging from 1 to 10, amino acids at the C-terminus, and/or
   [0290] b) an addition, in particular after the last amino acid at the C-terminus of said first membrane receptor, of an additional sequence of a number of amino acids ranging from 1 to the total number of amino acids of the region delimited by the cytoplasmic tail, preferably of a number of amino acids ranging from 1 to 20 amino acids, preferably of a number of amino acids ranging from 1 to 15 amino acids, more preferably of a number of amino acids ranging from 1 to 10 amino acids, preferably contiguous, originating from a second membrane receptor different from said first membrane receptor, preferably said additional sequence corresponding to the C-terminus of said second membrane receptor, and/or
   [0291] c) a substitution of a number of amino acids ranging from 1 to the total number of amino acids of the region delimited by the cytoplasmic tail, preferably a number of amino acids ranging from 1 to 20 amino acids, preferably a number of amino acids ranging from 1 to 15 amino acids, more preferably a number of amino acids ranging from 1 to 10 amino acids with an substitute sequence of a number of amino acids ranging from 1 to the total number of amino acids of the region delimited by the cytoplasmic tail, preferably a number of amino acids ranging from 1 to 20 amino acids, preferably a number of amino acids ranging from 1 to 15 amino acids, more preferably a number of amino acids ranging from 1 to 10 amino acids from a second membrane receptor different from said first membrane receptor,
      said hybrid protein being such that said ion channel retains the property of electrical current generation of said ion channel in its natural configuration, and that said first membrane receptor retains the ability to interact with the ligand of said first membrane receptor in its natural configuration.

[0292] In a preferred embodiment, the invention relates to a hybrid protein comprising or consisting in
[0293] a. the sequence of a first membrane receptor, said first membrane receptor belonging to the G-protein coupled receptors (GPCR) class A family, covalently fused at its C-terminus to
[0294] b. the N-terminus sequence of an ion channel, said ion channel belonging to the potassium channel families selected from the inwardly rectifying potassium channels (Kir) family and the voltage-dependent potassium channels (Kᵥ) family,
[0295] c. and possibly containing a linker sequence between the C-terminus of said first membrane receptor and the N-terminus part of said ion channel, said linker being absent in the natural configuration of said first membrane receptor and said ion channel,
[0296] said ion channel sequence being deleted of a number of amino acids ranging from 1 to the total number of amino acids of the region extending from the first amino acid at the N-terminus part of said ion channel to the first amino acid of the cytoplasmic α-helix that precedes the first of the two transmembrane α-helices that form the pore region of said potassium channel, preferably being deleted from 1 to 49 amino acids at the N-terminus part of said Kir ion channel, or being deleted from 1 to 435 amino acids at the N-terminus of said Kv ion channel,
[0297] said ion channel possibly containing a tag sequence,
[0298] said first membrane receptor being liable to present in its extracellular domain a mutation allowing the specific interaction with a ligand different from the ligand that interacts with the first membrane receptor in its natural configuration,
[0299] said first membrane receptor being liable to present in its cytoplasmic tail, said cytoplasmic tail being a sequence delimited by the first amino acid after the last amino acid of the transmembrane helix and the last amino acid of said first membrane receptor, in particular being liable to present in the 100 amino acids in its C-terminus part
   [0300] a deletion of a number of amino acids ranging from 1 to the total number of amino acids of the region delimited by the cytoplasmic tail, preferably of a number of amino acids ranging from 1 to 100, preferably of a number of amino acids ranging from 1 to 70, preferably of a number of amino acids ranging from 1 to 20 preferably of a number of amino acids ranging from 1 to 15, more preferably of a number of amino acids ranging from 1 to 10, amino acids at the C-terminus, provided that said deletion does not affect the transmembrane amino acid sequence of said membrane receptor and/or
   [0301] an addition, in particular after the last amino acid at the C-terminus of said first membrane receptor, of an additional sequence of a number of amino acids ranging from 1 to the total number of amino acids of the region delimited by the cytoplasmic tail, preferably of a number of amino acids ranging from 1 to 100 amino acids, preferably of a number of amino acids ranging from 1 to 70, preferably of a number of amino acids ranging from 1 to 20 amino acids, preferably of a number of amino acids ranging from 1 to 15 amino acids, more preferably of a number of amino acids ranging from 1 to 10 amino acids, preferably contiguous, originating from a second membrane receptor different from said first membrane receptor, preferably said additional sequence corresponding to the C-terminus of said second membrane receptor, and/or
   [0302] a substitution of a number of amino acids ranging from 1 to the total number of amino acids of the region delimited by the cytoplasmic tail, preferably a number of amino acids ranging from 1 to 20 amino acids, preferably a number of amino acids ranging from 1 to 15 amino acids, more preferably a number of amino acids ranging from 1 to 10 amino acids with an substitute sequence of a number of amino acids ranging from 1 to the total number of amino acids of the region delimited by the cytoplasmic tail, preferably a number of amino acids ranging from 1 to 20 amino acids, preferably a number of amino acids ranging from 1 to 15 amino acids, more preferably a number of amino acids ranging from 1 to 10 amino acids from a second membrane receptor different from said first membrane receptor
      said hybrid protein being such that said ion channel retains the property of electrical current generation of said ion channel in its natural configuration, and that said first membrane receptor retains the ability to interact with the ligand of said first membrane receptor in its natural configuration.

[0303] In an advantageous embodiment, the invention relates to a hybrid protein comprising or consisting in:
[0304] a. the sequence of a first membrane receptor, said first membrane receptor belonging to the G-protein coupled receptors (GPCR) class A family, covalently fused at its C-terminus to
[0305] b. the N-terminus sequence of an ion channel, said ion channel belonging to the potassium channel families selected from the inwardly rectifying potassium channels (Kir) family and the voltage-dependent potassium channels (Kᵥ) family,
   said ion channel sequence being deleted of a number of amino acids ranging from 1 to the total number of amino acids of the region extending from the first amino acid at the N-terminus part of said ion channel to the first amino acid of the cytoplasmic α-helix that precedes the first of the two transmembrane α-helices that form the pore region of said potassium channel,
   said ion channel possibly containing a tag sequence,
   said first membrane receptor being liable to present in its cytoplasmic tail at least one mutation, said cytoplasmic tail being a sequence delimited by the first amino acid after the last amino acid of the transmembrane helix and the last amino acid of said first membrane receptor,
[0306] a deletion of a number of amino acids ranging from 1 to the total number of amino acids of the region delimited by the cytoplasmic tail, and/or
[0307] an addition, of an additional sequence of a number of amino acids ranging from 1 to the total number of amino acids of the region delimited by the cytoplasmic tail, originating from a second membrane receptor different from said first membrane receptor, preferably said additional sequence corresponding to the C-terminus of said second membrane receptor and/or
[0308] a substitution of a number of amino acids ranging from 1 to the total number of amino acids of the region delimited by the cytoplasmic tail, with an substitute sequence of a number of amino acids ranging from 1 to the total number of amino acids of the region delimited by the cytoplasmic tail from a second membrane receptor different from said first membrane receptor
   said hybrid protein being such that said ion channel retains the property of electrical current generation of said ion channel in its natural configuration, and that said first membrane receptor retains the ability to interact with the ligand of said first membrane receptor in its natural configuration.

[0309] In one particular embodiment, the invention also relates to a hybrid protein comprising the sequence of a first membrane receptor fused at its C-terminus to the N-terminus of a ion channel, and possibly containing a linker between the C-terminus of said first membrane receptor and the N-terminus part of said ion channel, said linker being absent in the natural configuration of said first membrane receptor and said ion channel,
[0310] said ion channel sequence being deleted of a number of amino acids ranging from 1 to 29 amino acids at the N-terminus part of said ion channel, possibly containing a tag sequence,
[0311] said first membrane receptor being liable to present in the 70 amino acids in its C-terminus part
   [0312] of a number of amino acids ranging from Ito 20, preferably of a number of amino acids ranging from 1 to 15, more preferably of a number of amino acids ranging from 1 to 10, amino acids at the C-terminus, and/or
   [0313] an addition, in particular after the last amino acid at the C-terminus of said first membrane receptor, of an additional sequence of a number of amino acids ranging from 1 to 20 amino acids, preferably of a number of amino acids ranging from 1 to 15 amino acids, more preferably of a number of amino acids ranging from 1 to 10 amino acids, preferably contiguous, originating from a second membrane receptor different from said first membrane receptor, preferably said additional sequence corresponding to the C-terminus of said second membrane receptor, and/or
   [0314] a substitution of a number of amino acids ranging from 1 to 20 amino acids, preferably a number of amino acids ranging from 1 to 15 amino acids, more preferably a number of amino acids ranging from 1 to 10 amino acids with an substitute sequence of a number of amino acids ranging from 1 to 20 amino acids, preferably a number of amino acids ranging from 1 to 15 amino acids, more preferably a number of amino acids ranging from 1 to 10 amino acids from a second membrane receptor different from said first membrane receptor,
[0315] said hybrid protein being such that said ion channel retains the property of electrical current generation of said ion channel in its natural configuration, and that said first membrane receptor retains the ability to interact with the ligand of said first membrane receptor in its natural configuration.

[0316] This hybrid protein such as defined in the invention is new.
[0317] In one advantageous embodiment, the invention relates to a hybrid protein defined above, wherein said ion channel sequence said ion channel sequence being deleted of a number of amino acids ranging from 1 to the total number of amino acids of the region extending from the first amino acid at the N-terminus part of said ion channel to the first amino acid of the cytoplasmic α-helix that precedes the first of the two transmembrane α-helices that form the pore region of said potassium channel, preferably being deleted from 1 to 49 amino acids at the N-terminus part of said Kir ion channel, or being deleted from 1 to 435 amino acids at the N-terminus of said Kv ion channel, the numbering being defined from the first amino acid at the N-terminus of said ion channel in its natural configuration.

[0318] In one advantageous embodiment, the invention relates to a hybrid protein comprising the sequence of a first membrane receptor fused at its C-terminus to the N-terminus of a ion channel defined above, wherein:
[0319] said ion channel sequence is deleted of a number of amino acids ranging from 1 to the total number of amino acids of the region extending from the first amino acid at the N-terminus part of said ion channel to the first amino acid of the cytoplasmic α-helix that precedes the first of the two transmembrane α-helices that form the pore region of said potassium channel, preferably being deleted from 1 to 49 amino acids at the N-terminus part of said Kir ion channel, or being deleted from 1 to 435 amino acids at the N-terminus of said Kv ion channel, at the N-terminus part of said ion channel, and
[0320] said first membrane receptor is present in said hybrid protein in its natural configuration, and
[0321] a linker is present between the C-terminus of said first membrane receptor and the N-terminus part of said ion channel, said linker being absent in the natural configuration of said first membrane receptor and said ion channel.

[0322] In one advantageous embodiment, the invention relates to a hybrid protein comprising the sequence of a first membrane receptor fused at its C-terminus to the N-terminus of a ion channel defined above, wherein:
[0323] said ion channel sequence deleted of a number of amino acids ranging from 1 to the total number of amino acids of the region extending from the first amino acid at the N-terminus part of said ion channel to the first amino acid of the cytoplasmic α-helix that precedes the first of the two transmembrane α-helices that form the pore region of said potassium channel, preferably being deleted from 1 to 49 amino acids at the N-terminus part of said Kir ion channel, or being deleted from 1 to 435 amino acids at the N-terminus of said Kv ion channel, and
[0324] said first membrane receptor is deleted of a number of amino acids ranging from 1 to the total number of amino acids of the region delimited by the cytoplasmic tail, preferably of a number of amino acids ranging from 1 to 100, preferably from 1 to 20, preferably of a number of amino acids ranging from 1 to 15, more preferably of a number of amino acids ranging from 1 to 10, amino acids at the C-terminus, and
[0325] a linker is present between the C-terminus of said first membrane receptor and the N-terminus part of said ion channel, said linker being absent in the natural configuration of said first membrane receptor and said ion channel.

[0326] In one advantageous embodiment, the invention relates to a hybrid protein according described herein, wherein said first membrane has a deletion of contiguous amino acids at the C-terminus

[0327] In one advantageous embodiment, the invention relates to a hybrid protein comprising the sequence of a first membrane receptor fused at its C-terminus to the N-terminus of a ion channel defined above, wherein:
[0328] said ion channel sequence is deleted of a number of amino acids ranging from 1 to the total number of amino acids of the region extending from the first amino acid at the N-terminus part of said ion channel to the first amino acid of the cytoplasmic α-helix that precedes the first of the two transmembrane α-helices that form the pore region of said potassium channel, preferably being deleted from 1 to 49 amino acids at the N-terminus part of said Kir ion channel, or being deleted from 1 to 435 amino acids at the N-terminus of said Kv ion channel, and
[0329] an addition, in particular after the last amino acid at the C-terminus of said first membrane receptor, of an additional sequence of a number of amino acids ranging from 1 to the total number of amino acids of the region delimited by the cytoplasmic tail, preferably of a number of amino acids ranging from 1 to 100, preferably from 1 to 20 amino acids, preferably of a number of amino acids ranging from 1 to 15 amino acids, more preferably of a number of amino acids ranging from 1 to 10 amino acids, preferably contiguous, originating from a second membrane receptor different from said first membrane receptor, preferably said additional sequence corresponding to the C-terminus of said second membrane receptor, and
[0330] a linker is present between the C-terminus of said first membrane receptor and the N-terminus part of said ion channel, said linker being absent in the natural configuration of said first membrane receptor and said ion channel.

[0331] In one advantageous embodiment, the invention relates to a hybrid protein defined above, wherein said first membrane has an addition after the last amino acid at the C-terminus of an additional sequence corresponding to contiguous amino acids from the C-terminus of a second membrane receptor different from said first receptor

[0332] In one advantageous embodiment, the invention relates to a hybrid protein comprising the sequence of a first membrane receptor fused at its C-terminus to the N-terminus of a ion channel defined above, wherein:
[0333] said ion channel sequence is deleted of a number of amino acids ranging from 1 to the total number of amino acids of the region extending from the first amino acid at the N-terminus part of said ion channel to the first amino acid of the cytoplasmic α-helix that precedes the first of the two transmembrane α-helices that form the pore region of said potassium channel, preferably being deleted from 1 to 49 amino acids at the N-terminus part of said Kir ion channel, or being deleted from 1 to 435 amino acids at the N-terminus of said Kv ion channel, and
[0334] said first membrane receptor has, at the C-terminus part, a substitution of a number of amino acids ranging from 1 to the total number of amino acids of the region delimited by the cytoplasmic tail, preferably a number of amino acids ranging from 1 to 20 amino acids, preferably a number of amino acids ranging from 1 to 15 amino acids, more preferably a number of amino acids ranging from 1 to 10 amino acids with an substitute sequence of a number of amino acids ranging from 1 to the total number of amino acids of the region delimited by the cytoplasmic tail, preferably a number of amino acids ranging from 1 to 20 amino acids, preferably a number of amino acids ranging from 1 to 15 amino acids, more preferably a number of amino acids ranging from 1 to 10 amino acids from a second membrane receptor different from said first membrane receptor, and
[0335] a linker is present between the C-terminus of said first membrane receptor and the N-terminus part of said ion channel, said linker being absent in the natural configuration of said first membrane receptor and said ion channel.

[0336] In one advantageous embodiment, the invention relates to a hybrid protein defined above, wherein said first membrane, at the C-terminus part, has a contiguous substitute sequence originating from the C-terminus of a second membrane receptor different from said first membrane receptor.

[0337] In one advantageous embodiment, the invention relates to a hybrid protein comprising the sequence of a first membrane receptor fused at its C-terminus to the N-terminus of a ion channel defined above, wherein said first membrane receptor
[0338] a. is present in said hybrid protein in its natural configuration, or
[0339] b. is deleted of a number of amino acids ranging from 1 to the total number of amino acids of the region extending from the first amino acid at the N-terminus part of said ion channel to the first amino acids of the first α-helix of the transmembrane domain of said ion channel, or
[0340] c. has an addition, of an additional sequence of a number of amino acids ranging from 1 to the total number of amino acids of the region delimited by the cytoplasmic tail, originating from a second membrane receptor different from said first membrane receptor, preferably said additional sequence corresponding to the C-terminus of said second membrane receptor, or
[0341] d. has, a substitution of a number of amino acids ranging from 1 to the total number of amino acids of the region delimited by the cytoplasmic tail, with an substitute sequence of a number of amino acids ranging from 1 to the total number of amino acids of the region delimited by the cytoplasmic tail from a second membrane receptor different from said first membrane receptor,
   and a linker is possibly present between the C-terminus of said first membrane receptor and the N-terminus part of said ion channel, said linker being absent in the natural configuration of said first membrane receptor and said ion channel.

[0342] In one advantageous embodiment, the invention relates to a hybrid protein defined above, comprising a linker present between the C-terminus of said first membrane receptor and the N-terminus part of said ion channel, said linker being absent in the natural configuration of said first membrane receptor and said ion channel, in particular comprising or constituted by six contiguous glycine residues, represented by the following sequence: -G-G-G-G-G-G- (SEQ ID NO 196).

[0343] In one advantageous embodiment, the invention relates to a hybrid protein comprising the sequence of a first membrane receptor fused at its C-terminus to the N-terminus of a ion channel defined above, wherein:
[0344] said ion channel sequence is deleted of a number of amino acids ranging from 1 to the total number of amino acids of the region extending from the first amino acid at the N-terminus part of said ion channel to the first amino acid of the cytoplasmic α-helix that precedes the first of the two transmembrane α-helices that form the pore region of said potassium channel, preferably being deleted from 1 to 49 amino acids at the N-terminus part of said Kir ion channel, or being deleted from 1 to 435 amino acids at the N-terminus of said Kv ion channel, at the N-terminus part of said ion channel, and
[0345] said first membrane receptor is present in said hybrid protein in its natural configuration, and
[0346] said hybrid protein has no linker between the C-terminus of said first membrane receptor and the N-terminus part of said ion channel.

[0347] In one advantageous embodiment, the invention relates to a hybrid protein comprising the sequence of a first membrane receptor fused at its C-terminus to the N-terminus of a ion channel defined above, wherein:
[0348] said ion channel sequence is deleted of a number of amino acids ranging from 1 to the total number of amino acids of the region extending from the first amino acid at the N-terminus part of said ion channel to the first amino acid of the cytoplasmic α-helix that precedes the first of the two transmembrane α-helices that form the pore region of said potassium channel, preferably being deleted from 1 to 49 amino acids at the N-terminus part of said Kir ion channel, or being deleted from 1 to 435 amino acids at the N-terminus of said Kv ion channel, and
[0349] said first membrane receptor is deleted of a number of amino acids ranging from 1 to the total number of amino acids of the region delimited by the cytoplasmic tail, preferably of a number of amino acids ranging from 1 to 100, preferably from 1 to 20, of a number of amino acids ranging from 1 to 15, more of a number of amino acids ranging from 1 to 10, amino acids at the C-terminus, and
[0350] said hybrid protein has no linker between the C-terminus of said first membrane receptor and the N-terminus part of said ion channel.

[0351] In one advantageous embodiment, the invention relates to a hybrid protein defined above, wherein said first membrane has a deletion of contiguous amino acids at the C-terminus.

[0352] In one advantageous embodiment, the invention relates to a hybrid protein comprising the sequence of a first membrane receptor fused at its C-terminus to the N-terminus of a ion channel defined above, wherein:
[0353] said ion channel sequence is deleted of a number of amino acids ranging from 1 to the total number of amino acids of the region extending from the first amino acid at the N-terminus part of said ion channel to the first amino acid of the cytoplasmic α-helix that precedes the first of the two transmembrane α-helices that form the pore region of said potassium channel, preferably being deleted from 1 to 49 amino acids at the N-terminus part of said Kir ion channel, or being deleted from 1 to 435 amino acids at the N-terminus of said Kv ion channel, and
[0354] an addition, in particular after the last amino acid at the C-terminus of said first membrane receptor, of an additional sequence of a number of amino acids ranging from 1 to the total number of amino acids of the region delimited by the cytoplasmic tail, preferably of a number of amino acids ranging from 1 to 100, preferably from 1 to 20 amino acids, preferably of a number of amino acids ranging from 1 to 15 amino acids, more preferably of a number of amino acids ranging from 1 to 10 amino acids, preferably contiguous, originating from a second membrane receptor different from said first membrane receptor, preferably said additional sequence corresponding to the C-terminus of said second membrane receptor, and
[0355] said hybrid protein has no linker between the C-terminus of said first membrane receptor and the N-terminus part of said ion channel.

[0356] In one advantageous embodiment, the invention relates to a hybrid protein defined above, wherein said first membrane has an addition after the last amino acid at the C-terminus of an additional sequence corresponding to contiguous amino acids from the C-terminus of a second membrane receptor different from said first receptor

[0357] In one advantageous embodiment, the invention relates to a hybrid protein comprising the sequence of a first membrane receptor fused at its C-terminus to the N-terminus of a ion channel defined above, wherein:
[0358] said ion channel sequence is deleted of a number of amino acids ranging from 1 to the total number of amino acids of the region extending from the first amino acid at the N-terminus part of said ion channel to the first amino acid of the cytoplasmic α-helix that precedes the first of the two transmembrane α-helices that form the pore region of said potassium channel, preferably being deleted from 1 to 49 amino acids at the N-terminus part of said Kir ion channel, or being deleted from 1 to 435 amino acids at the N-terminus of said Kv ion channel, and
[0359] said first membrane receptor has, at the C-terminus part, a substitution of a number of amino acids ranging from 1 to the total number of amino acids of the region delimited by the cytoplasmic tail, preferably a number of amino acids ranging from 1 to 20 amino acids, preferably a number of amino acids ranging from 1 to 15 amino acids, more preferably a number of amino acids ranging from 1 to 10 amino acids with an substitute sequence of a number of amino acids ranging from 1 to the total number of amino acids of the region delimited by the cytoplasmic tail, preferably a number of amino acids ranging from 1 to 20 amino acids, preferably a number of amino acids ranging from 1 to 15 amino acids, more preferably a number of amino acids ranging from 1 to 10 amino acids from a second membrane receptor different from said first membrane receptor, and
[0360] said hybrid protein has no linker between the C-terminus of said first membrane receptor and the N-terminus part of said ion channel.

[0361] In one advantageous embodiment, the invention relates to a hybrid protein defined above, wherein said first membrane, at the C-terminus part, has a contiguous substitute sequence originating from the C-terminus of a second membrane receptor different from said first membrane receptor.

[0362] In one advantageous embodiment, the invention relates to a hybrid protein defined above, comprising a tag, in particular chosen among the group consisting in:
[0363] Hemaglutinin Tag, in particular comprising or consisting in SEQ ID NO 158,
[0364] Poly Arginine Tag, in particular comprising or consisting in SEQ ID NO 160,
[0365] Poly Histidine Tag, in particular comprising or consisting in SEQ ID NO 162,
[0366] Myc Tag, in particular comprising or consisting in SEQ ID NO 164,
[0367] Strep Tag, in particular comprising or consisting in SEQ ID NO 166,
[0368] Flag Tag, in particular comprising or consisting in SEQ ID NO 168,
[0369] S-Tag, in particular comprising or consisting in SEQ ID NO 170,
[0370] HAT Tag, in particular comprising or consisting in SEQ ID NO 172,
[0371] 3×Flag Tag, in particular comprising or consisting in SEQ ID NO 174,
[0372] Calmodulin-binding peptide Tag, in particular comprising or consisting in SEQ ID NO 176,
[0373] VSVG Tag, in particular comprising or consisting in SEQ ID NO 178,
[0374] SBP Tag, in particular comprising or consisting in SEQ ID NO 180,
[0375] Chitin-binding domain Tag, in particular comprising or consisting in SEQ ID NO 182,
[0376] GST Tag, in particular comprising or consisting in SEQ ID NO 184,
[0377] Maltose-Binding protein Tag, in particular comprising or consisting in SEQ ID NO 186,
[0378] GFP Tag, in particular comprising or consisting in SEQ ID NO 188,
[0379] RFP Tag, in particular comprising or consisting in SEQ ID NO 190,
[0380] YFP Tag, in particular comprising or consisting in SEQ ID NO 192, and
[0381] CFP Tag, in particular comprising or consisting in SEQ ID NO 194.

[0382] In another advantageous embodiment, the invention relates to a hybrid protein as defined above wherein said ion channel is chosen among:
[0383] the Kir potassium channels selected from the group comprising the potassium channels Kir1.1, Kir2.1, Kir2.2, Kir2.3, Kir2.4, Kir3.1, Kir3.2, Kir3.3, Kir3.4, Kir4.1, Kir4.2, Kir5.1, Kir6.1, Kir6.2 and Kir7.1, or

[0384] the Kv potassium channels selected from the group comprising the potassium channels Kv1.1, Kv1.2, Kv1.3, Kv1.4, Kv1.5, Kv1.6, Kv1.7, Kv1.8, Kv2.1, Kv2.2, Kv3.1, Kv3.2, Kv3.3, Kv3.4, Kv4.1, Kv4.2, Kv4.3, Kv5.1, Kv6.1, Kv6.2, Kv6.3, Kv6.4, Kv7.1, Kv7.2, Kv7.3, Kv7.4, Kv7.5, Kv8.1, Kv8.2, Kv9.1, Kv9.2, Kv9.3, Kv10.1, Kv10.2, Kv11.1, Kv11.2, Kv11.3, Kv12.1, Kv12. and Kv12.3.

[0385] In one advantageous embodiment, the invention relates to a hybrid protein defined above, wherein said first membrane receptor sequence is the sequence of a membrane receptor belonging to the family of G protein coupled receptors (GPCR) class A.

[0386] In one advantageous embodiment, the invention relates to a hybrid protein defined above, wherein said first and second membrane receptors are GPCR class A receptors chosen among the group comprising:
[0387] muscarinic receptor, in particular the human muscarinic M2 receptor, in particular comprising or constituted by SEQ ID NO 10,
[0388] adrenergic receptor, in particular the human β2-adrenergic receptor, in particular comprising or constituted by SEQ ID NO 12,
[0389] dopaminergic receptor, in particular the human dopaminergic long D2 receptor, in particular comprising or constituted by SEQ ID NO 14,
[0390] dopaminergic receptor, in particular the human dopaminergic D3 receptor, in particular comprising or constituted by SEQ ID NO 229,
[0391] serotonergic receptor, in particular the human 5HT1α receptor, in particular comprising or constituted by SEQ ID NO 16, and
[0392] canabinoïd receptor, in particular the human CB1 receptor, in particular comprising or constituted by SEQ ID NO 230.

[0393] In one advantageous embodiment, the invention relates to a hybrid protein defined above, wherein said first and second membrane receptors are GPCR class A receptors chosen among the group comprising the chemokine receptors, and preferably chosen among the group comprising:
[0394] CXCR4 receptor, in particular the human CXCR4 receptor, in particular comprising or constituted by SEQ ID NO 18,
[0395] CCR5 receptor, in particular the human CCR5 receptor, in particular comprising or constituted by SEQ ID NO 20, and
[0396] CCR2 receptor, in particular the human CCR2 receptor, in particular comprising or constituted by SEQ ID NO 231.

[0397] In another advantageous embodiment, the invention relates a hybrid protein as defined above wherein said ion channel is Kir6.2.

[0398] In one advantageous embodiment, the invention relates to a hybrid protein defined above, wherein said ion channel is the murine or human Kir6.2 ion channel, and in particular comprises or is constituted by the amino acid sequence SEQ ID NO 2.

[0399] In another advantageous embodiment, the invention relates to a hybrid protein defined above comprising:

1—a membrane receptor sequence, in its natural configuration, fused to the N-terminus deleted sequence of Kir6.2, or
2—a membrane receptor sequence, in its natural configuration, fused to a linker sequence, said linker sequence being fused to the N-terminus deleted sequence of Kir6.2, or
3—a membrane receptor sequence, deleted in its C-terminus part, fused to the N-terminus deleted sequence of Kir6.2, or
4—a membrane receptor sequence, deleted in its C-terminus part, fused to a linker sequence, said linker sequence being fused to the N-terminus deleted sequence of Kir6.2, or
5—a membrane receptor sequence, having an addition at the C-terminus of an additional sequence from a second membrane receptor, fused to the N-terminus deleted sequence of Kir6.2, or
6—a membrane receptor sequence, having an addition at the C-terminus of an additional sequence from a second membrane receptor, fused to a linker sequence, said linker sequence being fused to the N-terminus deleted sequence of Kir6.2, or
7—a membrane receptor sequence, having an substitution at the C-terminus with a substitution sequence from a second membrane receptor, fused to the N-terminus deleted sequence of Kir6.2, or
8—a membrane receptor sequence, having an substitution at the C-terminus with a substitution sequence from a second membrane receptor, fused to the N-terminus deleted sequence of Kir6.2, fused to a linker sequence, said linker sequence being fused to the N-terminus deleted sequence of Kir6.2.

[0400] In one advantageous embodiment, the invention relates to a hybrid defined above, wherein the Kir6.2 ion channel sequence is deleted in the C-terminus part, in particular deleted from 1 to 36 of its 36 last amino acids at the C-terminus, and in particular comprises or is constituted by the amino acid sequence SEQ ID NO 4.

[0401] In one advantageous embodiment, the invention relates to a hybrid protein defined above, wherein the sequence of the Kir6.2 ion channel sequence contains an insertion of 11 amino acids, preferably contiguous, in the external loop of said Kir6.2, and in particular comprises or is constituted by SEQ ID NO 6 or by SEQ ID NO 8.

[0402] In one advantageous embodiment, the invention relates to a hybrid protein defined above, wherein said hybrid protein is chosen among the group consisting in SEQ ID NO 2q, q varying from 15 to 70 and from 99 to 102.

[0403] In one advantageous embodiment, the invention relates to a hybrid protein defined above, wherein said hybrid protein is chosen among the group consisting in SEQ ID NO 22, SEQ ID NO 24, SEQ ID NO 32, SEQ ID NO 40, SEQ ID NO 48, SEQ ID NO 56, SEQ ID NO 64, SEQ ID NO 72, SEQ ID NO 80, SEQ ID NO 88 and SEQ ID NO 94.

[0404] In one advantageous embodiment, the invention relates to a hybrid protein defined above, wherein said hybrid protein is chosen among the group consisting in SEQ ID NO 2q, q varying from 71 to 78 and SEQ ID NO 206.

[0405] In one advantageous embodiment, the invention relates to a hybrid protein defined above, wherein said hybrid protein is chosen among the group consisting in SEQ ID NO 142, SEQ ID NO 144, SEQ ID NO 146, SEQ ID NO 148, SEQ ID NO 150, SEQ ID NO 152, SEQ ID NO 154, SEQ ID NO 156 and SEQ ID NO 206.

[0406] In one advantageous embodiment, the invention relates to a hybrid protein defined above, said hybrid protein being inserted in a membrane, preferably a membrane comprising lipids.

[0407] In one advantageous embodiment, the invention relates to a nucleic acid molecule coding for a hybrid protein defined above.

[0408] In one advantageous embodiment, the invention relates to a nucleic acid molecule defined above, wherein said nucleic molecule have a nucleic acid sequence chosen among the group consisting SEQ ID 2q-1, q varying from 15 to 78 from 99 to 103.

[0409] In one advantageous embodiment, the invention relates to a vector comprising or constituted by a nucleic acid molecule defined above, and comprising elements allowing the expression of said nucleic acid molecule in host cells.

[0410] In one advantageous embodiment, the invention relates to a vector defined above, wherein said host cells are chosen among bacteria, yeast, mammal cells, insect cells or amphibian oocytes.

[0411] The invention also relates to a method for in vitro diagnosis, in a biological sample of a subject, of a pathology associated with the presence or absence or the variation of amount of a molecule modifying the receptor activity of a first membrane in its natural configuration,
[0412] said presence or absence or variation of amount of said molecule being assessed with respect to the presence or absence or the given amount of said molecule, in a sample isolated from an healthy subject, comprising:
   [0413] contacting said hybrid protein, preferably immobilized in a support, with a biological sample, said biological sample being liable to contain molecule being able to selectively interact with first membrane receptor part of said hybrid protein,
   [0414] measuring the ion current generated by the ion channel part of the said hybrid protein,
   [0415] comparing said current generated with the current generated with by said hybrid protein contacted with control sample, said control sample corresponding to sample either not containing said molecule, or containing a given amount of said molecule,
   [0416] determining, from the previous steps, if the subject is afflicted by said pathology,
[0417] said hybrid protein comprising the sequence of a first membrane receptor fused at its C-terminus to the N-terminus of a ion channel, and possibly containing a linker between the C-terminus of said first membrane receptor and the N-terminus part of said ion channel, said linker being absent in the natural configuration of said first membrane receptor and said ion channel,
[0418] said ion channel sequence being deleted of a number of amino acids ranging from 1 to the total number of amino acids of the region extending from the first amino acid at the N-terminus part of said ion channel to the first amino acid of the cytoplasmic α-helix that precedes the first of the two transmembrane α-helices that form the pore region of said potassium channel, preferably being deleted from 1 to 49 amino acids at the N-terminus part of said Kir ion channel, or being deleted from 1 to 435 amino acids at the N-terminus of said Kv ion channel, possibly containing a tag sequence,
[0419] said first membrane receptor being liable to present in its extracellular domain a mutation allowing the specific interaction with a ligand different from the ligand that interact with the first membrane receptor in its natural configuration,
[0420] said first membrane receptor being liable to present in its cytoplasmic tail, said cytoplasmic tail being a sequence delimited by the last amino acids after the transmembrane domain to the last amino acid of said first membrane receptor,
   [0421] a deletion of a number of amino acids ranging from 1 to the total number of amino acids of the region delimited by the cytoplasmic tail, preferably of a number of amino acids ranging from 1 to 100, preferably of a number of amino acids ranging from 1 to 70, preferably of a number of amino acids ranging from 1 to 20 preferably of a number of amino acids ranging from 1 to 15, more preferably of a number of amino acids ranging from 1 to 10, amino acids at the C-terminus, provided that said deletion does not affect the transmembrane amino acid sequence of said membrane receptor and/or
   [0422] an addition, in particular after the last amino acid at the C-terminus of said first membrane receptor, of an additional sequence of a number of amino acids ranging from 1 to the total number of amino acids of the region delimited by the cytoplasmic tail, preferably of a number of amino acids ranging from 1 to 100 amino acids, preferably of a number of amino acids ranging from 1 to 70, preferably of a number of amino acids ranging from 1 to 20 amino acids, preferably of a number of amino acids ranging from 1 to 15 amino acids, more preferably of a number of amino acids ranging from 1 to 10 amino acids, preferably contiguous, originating from a second membrane receptor different from said first membrane receptor, preferably said additional sequence corresponding to the C-terminus of said second membrane receptor, and/or
   [0423] a substitution of a number of amino acids ranging from 1 to the total number of amino acids of the region delimited by the cytoplasmic tail, preferably a number of amino acids ranging from 1 to 20 amino acids, preferably a number of amino acids ranging from 1 to 15 amino acids, more preferably a number of amino acids ranging from 1 to 10 amino acids with an substitute sequence of a number of amino acids ranging from 1 to the total number of amino acids of the region delimited by the cytoplasmic tail, preferably a number of amino acids ranging from 1 to 20 amino acids, preferably a number of amino acids ranging from 1 to 15 amino acids, more preferably a number of amino acids ranging from 1 to 10 amino acids from a second membrane receptor different from said first membrane receptor,
[0424] said hybrid protein being such that said ion channel retains the property of electrical current generation of said ion channel in its natural configuration, and that said first membrane receptor retains the ability to interact with the ligand of said first membrane receptor in its natural configuration.

[0425] The invention also relates to a method for in vitro diagnosis, in a biological sample of a subject, of a pathology associated with the presence or absence or the variation of amount of a molecule modifying the receptor activity of a first membrane in its natural configuration,
[0426] said presence or absence or variation of amount of said molecule being assessed with respect to the presence or absence or the given amount of said molecule, in a sample isolated from an healthy subject, comprising:
   [0427] contacting said hybrid protein, preferably immobilized in a support, with a biological sample, said biological sample being liable to contain molecule being able to selectively interact with first membrane receptor part of said hybrid protein,
   [0428] measuring the ion current generated by the ion channel part of the said hybrid protein,
   [0429] comparing said current generated with the current generated with by said hybrid protein contacted with control sample, said control sample corresponding to sample either not containing said molecule, or containing a given amount of said molecule,
   [0430] determining, from the previous steps, if the subject is afflicted by said pathology,
[0431] said hybrid protein comprising the sequence of a first membrane receptor fused at its C-terminus to the N-terminus of a ion channel, and possibly containing a linker between the C-terminus of said first membrane receptor and the N-terminus part of said ion channel, said linker being absent in the natural configuration of said first membrane receptor and said ion channel,
[0432] said ion channel sequence being being deleted of a number of amino acids ranging from 1 to the total number of amino acids of the region extending from the first amino acid at the N-terminus part of said ion channel to the first amino acid of the cytoplasmic α-helix that precedes the first of the two transmembrane α-helices that form the pore region of said potassium channel, preferably being deleted from 1 to 49 amino acids at the N-terminus part of said Kir ion channel, or being deleted from 1 to 435 amino acids at the N-terminus of said Kv ion channel, possibly containing a tag sequence,
[0433] said first membrane receptor being liable to present in the 70 amino acids in its C-terminus part
   [0434] a) of a number of amino acids ranging from 1 to 100, preferably from 1 to 20, preferably of a number of amino acids ranging from 1 to 15, more preferably of a number of amino acids ranging from 1 to 10, amino acids at the C-terminus, and/or
   [0435] b) an addition, in particular after the last amino acid at the C-terminus of said first membrane receptor, of an additional sequence of a number of amino acids ranging from 1 to 100, preferably from 1 to 20 amino acids, preferably of a number of amino acids ranging from 1 to 15 amino acids, more preferably of a number of amino acids ranging from 1 to 10 amino acids, preferably contiguous, originating from a second membrane receptor different from said first membrane receptor, preferably said additional sequence corresponding to the C-terminus of said second membrane receptor, and/or
   [0436] c) a substitution of a number of amino acids ranging from 1 to 20 amino acids, preferably a number of amino acids ranging from 1 to 15 amino acids, more preferably a number of amino acids ranging from 1 to 10 amino acids with an substitute sequence of a number of amino acids ranging from 1 to 20 amino acids, preferably a number of amino acids ranging from 1 to 15 amino acids, more preferably a number of amino acids ranging from 1 to 10 amino acids from a second membrane receptor different from said first membrane receptor,
[0437] said hybrid protein being such that said ion channel retains the property of electrical current generation of said ion channel in its natural configuration, and that said first membrane receptor retains the ability to interact with the ligand of said first membrane receptor in its natural configuration.

[0438] In one advantageous embodiment, the invention relates to a method for in vitro diagnosis, in a biological sample of a subject, of pathologies associated with the presence or absence or the variation of amount of a molecule modifying the receptor activity of a first membrane receptor in its natural configuration,

said presence or absence or variation of amount of said molecule being assessed with respect to the presence or absence or the given amount of said molecule, in a sample isolated from an healthy subject, comprising:
[0439] contacting said hybrid protein, preferably said hybrid protein being a hybrid protein according to anyone of claims 9 to 16, preferably immobilized in a support, with a biological sample, said biological sample being liable to contain molecule being able to selectively interact with first membrane receptor part of said hybrid protein,
[0440] measuring the current generated by the ion channel part of the said hybrid protein, preferably measured by appropriate means of electrophysiology, or reconstitution in artificial lipid bilayers, or any techniques designed to measure ion flux through potassium channels,
[0441] comparing said current generated with the current generated with by said hybrid protein contacted with control sample, said control sample corresponding to sample either not containing said molecule, or containing a given amount of said molecule,
[0442] determining, from the previous steps, if the subject is afflicted by said pathologies,
   said hybrid protein comprising or consisting in
[0443] a. the sequence of a first membrane receptor, said first membrane receptor belonging to the G-protein coupled receptors (GPCR) class A family, covalently fused at its C-terminus to
[0444] b. the N-terminus sequence of an ion channel, said ion channel belonging to the potassium channel families selected from the inwardly rectifying potassium channels (Kir) family and the voltage-dependent potassium channels (Kᵥ) family,
   said ion channel sequence being deleted of a number of amino acids ranging from 1 to the total number of amino acids of the region extending from the first amino acid at the N-terminus part of said ion channel to the first amino acid of the cytoplasmic α-helix that precedes the first of the two transmembrane α-helices that form the pore region of said potassium channel,
   said ion channel possibly containing a tag sequence,
   said first membrane receptor being liable to present in its cytoplasmic tail, said cytoplasmic tail being a sequence delimited by the first amino acid after the last amino acid of the transmembrane helix and the last amino acid of said first membrane receptor,
[0445] a deletion of a number of amino acids ranging from 1 to the total number of amino acids of the region delimited by the cytoplasmic tail, and/or
[0446] an addition, of an additional sequence of a number of amino acids ranging from 1 to the total number of amino acids of the region delimited by the cytoplasmic tail, originating from a second membrane receptor different from said first membrane receptor, preferably said additional sequence corresponding to the C-terminus of said second membrane receptor and/or
[0447] a substitution of a number of amino acids ranging from 1 to the total number of amino acids of the region delimited by the cytoplasmic tail, with an substitute sequence of a number of amino acids ranging from 1 to the total number of amino acids of the region delimited by the cytoplasmic tail from a second membrane receptor different from said first membrane receptor
   said hybrid protein being such that said ion channel retains the property of electrical current generation of said ion channel in its natural configuration, and that said first membrane receptor retains the ability to interact with the ligand of said first membrane receptor in its natural configuration.

[0448] An advantageous embodiment of the invention relates to a method for in vitro diagnosis as defined above, wherein said hybrid protein comprises or consists in amino acids sequences chosen among SEQ ID NO 2q, q varying from 15 to 78 and from 99 to 103.

[0449] In the method of the invention, biological sample refers to a sample obtained from an organism or from components (e.g., cells) of an organism. The sample may be one of any biological tissue. Frequently the sample could be a “clinical sample” which is a sample derived from a patient. Such samples include, but are not limited to blood, serum, urine and lymph sample. Biological samples may also include sections of tissues such as frozen sections taken for histological purposes.

[0450] According to the invention, “molecule modifying the receptor activity” corresponds to any molecule, chemical or biological, liable to interact with said membrane receptor in its natural configuration, and as a result of this interaction modifying the natural function of said membrane receptor. For example, if a membrane receptor is implicated in the detoxification of cells, said molecule modifying the receptor activity can either inhibit or reduce this function, or enhance the function of detoxification. In this case it will be easy to define molecule with inhibiting activity as an antagonist, and molecule with enhancing activity as agonist.

[0451] In a particular aspect of the invention, the molecule modifying the receptor activity can be a natural molecule interacting with said membrane receptor, i.e. its ligand, which has been modified by one or more mutations in the corresponding gene. These mutations can have the effect to, enhance the presence of said ligand or reduce the expression of said ligand. An alternative is that these mutations do not modify the quantity of ligand but its quality, in term of functional interaction and modulation of receptor activity.

[0452] In this case, the “modified ligand” is able to interact with its receptor, but does not present the natural function and then modify the receptor activity.

[0453] Then the invention also relates to a method for in vitro diagnosis defined above, wherein pathology is associated with the presence a modified ligand molecule modifying the receptor activity of a first membrane in its natural configuration/According to the invention, the “determination of the presence” indicates that if molecule modifying the receptor activity can be detected in a biological sample, said molecule modifying the receptor activity is considered as present in the biological sample. On the contrary, if said molecule modifying the receptor activity can not be detected by the method of the invention, the molecule modifying the receptor activity is considered as absent from the biological sample.

[0454] According to the invention, the “variation of amount” molecule modifying the receptor activity means that the quantity of said molecule modifying the receptor activity is measured. The value associated to the measure of the quantity of molecule modifying the receptor activity is compared at least with a control, preferably with two control samples. The value associated to the measure is null in the control negative sample, and the value associated to the measure of the quantity of molecule is positive in the control positive sample.

[0455] The control sample corresponds to a biological sample of a healthy individual, or patient, wherein said molecule modifying the receptor activity is either absent or present at a known level, said known level being defined as the standard level.

[0456] So, if the molecule modifying the receptor activity is absent of the biological sample, the value of the quantification is null. On the other hand, if the molecule is present, the value of the quantification is superior to zero.

[0457] Then, the method of the invention consists in contacting biological sample of a subject, with hybrid protein according to the invention. Contact between biological sample and hybrid protein may allow the formation of a complex between the hybrid protein and molecule modifying the receptor activity, when present.

[0458] If a complex is formed, the hybrid protein is able to generate, via the ion channel part, an electrical signal.

[0459] Then the generated current is measured using standard electrophysiological techniques commonly used in the art. Classical electrophysiology techniques involve placing electrodes into various preparations of biological tissue. The principal types of electrodes are:

1) simple solid conductors, such as discs and needles (singles or arrays),
2) tracings on printed circuit boards, and
3) hollow tubes filled with an electrolyte, such as glass pipettes. The principal preparations include 1) living organisms, 2) excised tissue (acute or cultured), 3) dissociated cells from excised tissue (acute or cultured), 4) artificially grown cells or tissues, or 5) hybrids of the above.

[0460] The commonly used techniques to detect an ionic current through one or many channels according to the invention are, but not limited to, patch clamp, microelectrode recordings, artificial lipid bilayer recordings [Hamill O P, Marty A, Neher E, Sakmann B, Sigworth F J (1981) Improved patch-clamp techniques for high-resolution current recording from cells and cell-free membrane patches. Pflügers Arch-Eur J. Physiol. 391:85-100; Ashcroft F M (2000) Studying ion channels. In: Ion channels and disease, Academic Press; Priest B T, Swensen A M, McManus O B (2007) Automated electrophysiology in drug discovery. Curr Pharm Des. 13:2325-37], detection of current-induced changes in membrane potential using voltage-sensitive dyes or measurement of ion movement using channel-permeant detectable ions [Arkhammar P, Wahl P, Gerlach B, Fremming T, Hansen J B (2004) Establishment and application of in vitro membrane potential assays in cell lines with endogenous or recombinant expression of ATP-sensitive potassium channels (Kir6.2/SUR1) using a fluorescent probe kit. J Biomol Screen. 9:382-90; Molokanova M, Savchenko A (2008) Bright future of optical assays for ion channel drug discovery. Drug Discov Today. 13:14-22; Molokanova M, Savchenko A (2008) Bright future of optical assays for ion channel drug discovery. Drug Discov Today. 13:14-22]

[0461] This generated measured current is then compared to the measured current of at least a control sample. Said control sample has a known amount of molecules modifying receptor activity, or has none.

[0462] From the comparison between the measured current and the control current, it is possible to determine whether a modifying molecule is present, or absent, or have a modified amount. And then it is possible to conclude if the patient, from whom originates the biological sample, is afflicted by a pathology associated with the presence or absence or the variation of amount of a molecule modifying the receptor activity of a first membrane in its natural configuration.

[0463] In one advantageous embodiment, the invention relates to a method for in vitro diagnosis of pathologies defined above, wherein said hybrid protein is a hybrid protein defined above.

[0464] In one advantageous embodiment, the invention relates to a method for in vitro diagnosis of pathologies defined above, where in said generated current is measured by appropriate means of electrophysiology, or reconstitution in artificial lipid bilayers, or any techniques designed to measure ion flux through potassium channels using, for instance, channel-permeant labelled ions [Molokanova M, Savchenko A (2008) Bright future of optical assays for ion channel drug discovery. Drug Discov Today. 13:14-22].

[0465] In one advantageous embodiment, the invention relates to a method for in vitro diagnosis of pathologies defined above, wherein said ligand is chosen among growth factor, chemokine and neurotransmitter.

[0466] In one advantageous embodiment, the invention relates to a method for the in vitro diagnosis of pathologies defined above, wherein said pathologies are chosen among the group consisting in diseases characterized by abnormal hormone or neurotransmitter secretion, Neural diseases, such as Parkinson disease, Depression, Diabetes, Cardiovascular diseases, such as hyper- and hypotensive diseases, virus infection, such as HIV, chronic inflammation, asthma, obesity, pain, ischemic diseases, and cancer.

[0467] The method according to the invention gives a direct and rapid method that allow the detection of variation (presence, absence or variation of amount) of hormones, cytokines, chemokines, neurotransmitters, or any other biological molecule liable to interact with a membrane receptor.

[0468] For example, concerning HIV infection, it is known that virus need the presence of CXCR4 and CCR5 chemokines co-receptor to allow the entry of virus into the target cell [Tsibris A M, Kuritzkes D R (2007) Chemokine antagonists as therapeutics: focus on HIV-1. Annu Rev Med. 58:445-59]. Then by using a hybrid protein containing as first membrane receptor CXCR4 or CCR5 receptor, it is easy to determine, in comparison with control samples, if a biological sample contain HIV viral particles.

[0469] These two examples cited above are not limitative, and only illustrate the potential application of the hybrid protein and the method using said hybrid protein in human pathologies diagnosis.

[0470] It also interesting, according to the invention to consider that poisoning pathologies can also be detected by the method described above.

[0471] Indeed, if a poisoning molecule, such as toxin, heavy metal and derivatives, cyanide etc. . . . , is able to specifically interact with a membrane receptor, the hybrid protein according to the invention comprising said membrane receptor, would allow to detect said poisoning molecule.

[0472] Therefore, the present invention gives an easy method allowing the detection of various poisoning molecule in human or animal liquid fluids.

[0473] In one advantageous embodiment, the invention relates to a method for the in vitro diagnosis of pathologies defined above, wherein said biological sample is a body fluid, such as blood, lymph, serum, urine, sweat, saliva and cerebrospinal fluid.

[0474] The invention also relates to a method for screening a compound able to modify the receptor activity of a first membrane receptor in its natural configuration,
[0475] comprising:
   [0476] contacting a compound, with a hybrid protein as defined above, preferably immobilized on a support, in presence of a ligand of said membrane receptor,
   [0477] measuring the current generated by the ion channel of the said hybrid protein,
   [0478] comparing said current generated with the current generated with by said hybrid protein contacted with an identified compound known to modify said receptor activity,
   [0479] determining, from the previous steps the effect of said compound on the activity of said first membrane receptor in its natural configuration
[0480] said hybrid protein comprising the sequence of a first membrane receptor fused at its C-terminus to the N-terminus of a ion channel, and possibly containing a linker between the C-terminus of said first membrane receptor and the N-terminus part of said ion channel, said linker being absent in the natural configuration of said first membrane receptor and said ion channel,
[0481] said ion channel sequence being being deleted of a number of amino acids ranging from 1 to the total number of amino acids of the region extending from the first amino acid at the N-terminus part of said ion channel to the first amino acid of the cytoplasmic α-helix that precedes the first of the two transmembrane α-helices that form the pore region of said potassium channel, preferably being deleted from 1 to 49 amino acids at the N-terminus part of said Kir ion channel, or being deleted from 1 to 435 amino acids at the N-terminus of said Kv ion channel, possibly containing a tag sequence,
[0482] said first membrane receptor being liable to present in its extracellular domain a mutation allowing the specific interaction with a ligand different from the ligand that interact with the first membrane receptor in its natural configuration,
[0483] said first membrane receptor being liable to present in its cytoplasmic tail, said cytoplasmic tail being a sequence delimited by the last amino acids after the transmembrane domain to the last amino acid of said first membrane receptor,
   [0484] a) a deletion of a number of amino acids ranging from 1 to the total number of amino acids of the region delimited by the cytoplasmic tail, preferably of a number of amino acids ranging from 1 to 100, preferably from 1 to 20, preferably of a number of amino acids ranging from 1 to 15, more preferably of a number of amino acids ranging from 1 to 10, amino acids at the C-terminus, and/or
   [0485] b) an addition, in particular after the last amino acid at the C-terminus of said first membrane receptor, of an additional sequence of a number of amino acids ranging from 1 to the total number of amino acids of the region delimited by the cytoplasmic tail, preferably of a number of amino acids ranging from 1 to 100, preferably from 1 to 20 amino acids, preferably of a number of amino acids ranging from 1 to 15 amino acids, more preferably of a number of amino acids ranging from 1 to 10 amino acids, preferably contiguous, originating from a second membrane receptor different from said first membrane receptor, preferably said additional sequence corresponding to the C-terminus of said second membrane receptor, and/or
   [0486] c) a substitution of a number of amino acids ranging from 1 to the total number of amino acids of the region delimited by the cytoplasmic tail, preferably a number of amino acids ranging from 1 to 20 amino acids, preferably a number of amino acids ranging from 1 to 15 amino acids, more preferably a number of amino acids ranging from 1 to 10 amino acids with an substitute sequence of a number of amino acids ranging from 1 to the total number of amino acids of the region delimited by the cytoplasmic tail, preferably a number of amino acids ranging from 1 to 20 amino acids, preferably a number of amino acids ranging from 1 to 15 amino acids, more preferably a number of amino acids ranging from 1 to 10 amino acids from a second membrane receptor different from said first membrane receptor,
[0487] said hybrid protein being such that said ion channel retains the property of ionic current generation of said ion channel in its natural configuration, and that said first membrane receptor retains the ability to interact with the ligand of said first membrane receptor in its natural configuration.

[0488] The invention also relates to a method for screening a compound able to modify the activity of a first membrane receptor in its natural configuration, said compound being preferably an agonist or an antagonist,

comprising:
[0489] contacting a compound, with a hybrid protein, preferably said hybrid protein being a hybrid protein according to anyone of claims 9 to 16, preferably immobilized on a support, in presence of a ligand of said membrane receptor,
[0490] measuring the current generated by the ion channel of the said hybrid protein, preferably measured by appropriate means of electrophysiology, or reconstitution in artificial lipid bilayers, or any technique designed to directly or indirectly measure ion flux through potassium channels,
[0491] comparing said current generated with the current generated with by said hybrid protein contacted with an identified compound known to modify said receptor activity,
[0492] determining, from the previous steps the effect of said compound on the activity of said first membrane receptor in its natural configuration
   said hybrid protein comprising or consisting in
[0493] a. the sequence of a first membrane receptor, said first membrane receptor belonging to the G-protein coupled receptors (GPCR) class A family, covalently fused at its C-terminus to
[0494] b. the N-terminus sequence of an ion channel, said ion channel belonging to the potassium channel families selected from the inwardly rectifying potassium channels (Kir) family and the voltage-dependent potassium channels (Kᵥ) family,
   said ion channel sequence being deleted of a number of amino acids ranging from 1 to the total number of amino acids of the region extending from the first amino acid at the N-terminus part of said ion channel to the first amino acid of the cytoplasmic α-helix that precedes the first of the two transmembrane α-helices that form the pore region of said potassium channel,
   said ion channel possibly containing a tag sequence,
   said first membrane receptor being liable to present in its cytoplasmic tail, said cytoplasmic tail being a sequence delimited by the first amino acid after the last amino acid of the transmembrane helix and the last amino acid of said first membrane receptor,
[0495] a deletion of a number of amino acids ranging from 1 to the total number of amino acids of the region delimited by the cytoplasmic tail, and/or
[0496] an addition, of an additional sequence of a number of amino acids ranging from 1 to the total number of amino acids of the region delimited by the cytoplasmic tail, originating from a second membrane receptor different from said first membrane receptor, preferably said additional sequence corresponding to the C-terminus of said second membrane receptor and/or
[0497] a substitution of a number of amino acids ranging from 1 to the total number of amino acids of the region delimited by the cytoplasmic tail, with an substitute sequence of a number of amino acids ranging from 1 to the total number of amino acids of the region delimited by the cytoplasmic tail from a second membrane receptor different from said first membrane receptor
   said hybrid protein being such that said ion channel retains the property of electrical current generation of said ion channel in its natural configuration, and that said first membrane receptor retains the ability to interact with the ligand of said first membrane receptor in its natural configuration.

[0498] An advantageous embodiment of the invention relates to a method for screening as defined above, wherein said hybrid protein comprises or consists in amino acids sequences chosen among SEQ ID NO 2q, q varying from 15 to 78 and from 99 to 103.

[0499] The invention also relates to a method for screening a compound able to modify the receptor activity of a first membrane receptor in its natural configuration,
[0500] comprising:
   [0501] contacting a compound, with a hybrid protein, preferably immobilized on a support, in presence of a ligand of said membrane receptor,
   [0502] measuring the current generated by the ion channel of the said hybrid protein,
   [0503] comparing said current generated with the current generated with by said hybrid protein contacted with an identified compound known to modify said receptor activity,
   [0504] determining, from the previous steps the effect of said compound on the activity of
[0505] said first membrane receptor in its natural configuration said hybrid protein comprising the sequence of a first membrane receptor fused at its C-terminus to the N-terminus of a ion channel, and possibly containing a linker between the C-terminus of said first membrane receptor and the N-terminus part of said ion channel, said linker being absent in the natural configuration of said first membrane receptor and said ion channel,
[0506] said ion channel sequence being being deleted of a number of amino acids ranging from 1 to the total number of amino acids of the region extending from the first amino acid at the N-terminus part of said ion channel to the first amino acid of the cytoplasmic α-helix that precedes the first of the two transmembrane α-helices that form the pore region of said potassium channel, preferably being deleted from 1 to 49 amino acids at the N-terminus part of said Kir ion channel, or being deleted from 1 to 435 amino acids at the N-terminus of said Kv ion channel,
[0507] said first membrane receptor being liable to present in the 70 amino acids in its C-terminus part
   [0508] of a number of amino acids ranging from 1 to 100, preferably from 1 to 20, preferably of a number of amino acids ranging from 1 to 15, more preferably of a number of amino acids ranging from 1 to 10, amino acids at the C-terminus, and/or
   [0509] an addition, in particular after the last amino acid at the C-terminus of said first membrane receptor, of an additional sequence of a number of amino acids ranging from 1 to 100, preferably from 1 to 20 amino acids, preferably of a number of amino acids ranging from 1 to 15 amino acids, more preferably of a number of amino acids ranging from 1 to 10 amino acids, preferably contiguous, originating from a second membrane receptor different from said first membrane receptor, preferably said additional sequence corresponding to the C-terminus of said second membrane receptor, and/or
   [0510] a substitution of a number of amino acids ranging from 1 to 20 amino acids, preferably a number of amino acids ranging from 1 to 15 amino acids, more preferably a number of amino acids ranging from 1 to 10 amino acids with an substitute sequence of a number of amino acids ranging from 1 to 20 amino acids, preferably a number of amino acids ranging from 1 to 15 amino acids, more preferably a number of amino acids ranging from 1 to 10 amino acids from a second membrane receptor different from said first membrane receptor,
[0511] said hybrid protein being such that said ion channel retains the property of ionic current generation of said ion channel in its natural configuration, and that said first membrane receptor retains the ability to interact with the ligand of said first membrane receptor in its natural configuration.

[0512] In one advantageous embodiment, the invention relates to a method for screening compound defined above, wherein said hybrid protein is a hybrid protein defined above.

[0513] In one advantageous embodiment, the invention relates to a method for screening compound defined above, wherein said known compound is an agonist or an antagonist of the activity of said first membrane receptor in its natural configuration.

[0514] In one advantageous embodiment, the invention relates to a method defined above, wherein said hybrid protein is immobilized on a support chosen among the group consisting in artificial membrane, natural or artificial membrane containing lipids, and chip comprising artificial membrane, or natural or artificial membrane containing lipids, or incorporated in the membrane of cells or liposomes.

[0515] The present invention will be better understood using the following examples 1 to 9 that are given only by way of illustration, and are non-limitative, as well as using the attached FIGS. 1 to 16 in which:

[0516] FIG. 1 schematically represents the hybrid proteins of the invention. Most cases are illustrated, i.e. the case of hybrid protein containing membrane receptor in its natural configuration, the case of hybrid protein containing membrane receptor deleted of amino acids in its C-terminus, the case of hybrid protein containing membrane receptor with a substitution of the C-terminus part of first membrane receptor with the C-terminus part of second membrane receptor, with or without linker sequence.
[0517] indicates the membrane receptor amino acids liable to be modified; indicates the ion channel amino acids liable to be modified; N—represent N-terminus and C—represents C-terminus; Linker indicates the presence of a linker sequence.

[0518] FIG. 2 schematically represents Kir6.2 protein inserted in plasma membrane. Out designates the extracellular compartment. Arrow indicates the position of external loop where tag is inserted.

[0519] FIG. 3a represents design and basic properties of hybrids proteins comprising M2 receptor and Kir6.2 ion channel. The sequences of the region linking M2 C-ter and Kir6.2 N-ter for some experimental constructs are represented. The numbering indicated under the sequences corresponds to the numbering of amino acids of human M2 and mouse Kir6.2. The name of each construct is indicated at left. GGGGGG represents a hexa-glycine linker; —

represents a single peptide bond.

[0520] M2+K indicates that M2 and Kir6.2 are not fused and are in their natural configuration.

[0521] M2−K indicates that M2 receptor, in its natural configuration, is fused to Kir6.2, in its natural configuration.

[0522] M2−K 0-20, M2−K 0-25 and M2−K 0-30 represents hybrid protein comprising M2 receptor, in its natural configuration, respectively fused to Kir6.2 deleted of its 20 first amino acids, 25 first amino acids, or 30 first amino acids.

[0523] FIG. 3b shows representative two-electrode voltage clamp (TEVC) recordings from xenopus oocytes expressing M2+K, M2−K 0-25, M2−K 0-20 or M2−K 0-30 as indicated at right. Bath contained 150 mM K⁺ and potential was set at −50 mV so that K⁺ currents are inward and represented by convention as negative (dashed line shows 0 current level). The M2 agonist acetylcholine (ACh) was applied at 5 μM (black bar) and caused an increase in current for constructs M2−K 0-20 and M2−K 0-25. 3 mM Baryum (Ba²⁺) is used as a K channel blocker to confirm that currents arose from K channels.

[0524] FIG. 3c represents the average agonist-induced variation in currents for the different constructs obtained during experiments as in FIG. 3b. Y-axis represents the percent change in current induced by acetylcholine [5 μM]. White column represents M2+K proteins; dark grey column represents M2−K hybrid protein; stripped column represents M2−K 0-20 hybrid protein; light grey column represents M2−K 0-25 hybrid protein; and black column represents M2−K 0-30 hybrid protein. Data is mean±standard error. N was >10.

[0525] FIG. 4a schematically represents, on the left, the hybrid protein M2−Kir6.2 inserted in the plasma membrane, and on the right, the intracellular connection between M2 receptor comprised in the M2-Kir6.2 hybrid protein and the natural G-protein-activated ion channel Kir3.4ST. Black ball represents acetylcholine (ACh); triangle represents hetero-trimeric G proteins.

[0526] FIG. 4b shows representative two-electrode voltage clamp (TEVC) recordings from xenopus oocytes expressing M2−K (upper left), M2−K⁺ Kir3.4ST (upper right), M2−K 0-30 (lower left) and M2−K⁺ Kir3.4ST (lower right). Bath contained 150 mM K⁺ and potential was set at −50 mV so that K⁺ currents are inward and represented by convention as negative (dashed line shows the baseline of baryum-sensitive current). The M2 agonist acetylcholine (ACh) was applied at 5 μM (black bar) and caused an increase in current for constructs M2−K⁺ Kir3.4ST and M2−K 0-30+Kir3.4ST. 3 mM Baryum (Ba²⁺) is used as a K channel blocker to confirm that currents arose from K channels.

[0527] FIG. 4c is a graph representing the average agonist-induced variation in currents for the different constructs obtained during experiments as in FIG. 4b. The Y-axis represents the percentage of change induced by 5 μM of ACh. First column represents M2−K results, second column represents M2-K+Kir3.4ST results, third column M2−K 0-30 results and fourth column represents M2−K 0-30+Kir3.4ST results. Results are means±standard error. * and ** represent significant differences.

[0528] FIG. 5a shows representative two-electrode voltage clamp recordings from xenopus oocytes expressing M2+K, M2−K 0-20 or M2−K 0-25 as indicated. The M2 agonist ACh was applied at 5 μM (black bar) and caused an increase in current for constructs M2−K 0-20 and M2−K 0-25. Also the M2 antagonist atropine was supplied at 1 μM (upper bar) and inhibits the ACh-induced current of constructs M2−K 0-20 and M2−K 0-25. 3 mM Baryum (Ba²⁺) is used as a K channel blocker to confirm that currents arose from K⁺ channels.

[0529] FIG. 5b is a graph representing the compilation of data obtained in many experiments as in FIG. 5a.

[0530] The Y-axis represents the percentage of change in current.

[0531] Black column represents current variation in presence of ACh, and grey column represent the current variation in presence of ACh+Atropine. Results are means±standard error. * represents significant differences. First group of column represents M2+K, second group of column represents M2−K 0+20, and third group of column represents M2−K 0-25

[0532] FIG. 5c is a graph indicating the % change of the current induced by different Carbachole (CCh) concentrations, a M2 activator. The Y-axis represents the percentage induced by CCh, and X-axis represents the concentration in CCh (logarithm scale).

[0533] Ball represents data of M2+K, Square represents data of M2−K (with 4.3 μM), inverted triangle represents data of M2−K 0-20, triangle represents data of M2−K 0-25 and lozenge represents data of M2−K 0-30.

[0534] FIG. 6a shows representative two-electrode voltage clamp recordings from xenopus oocytes expressing M2+Kir3.4ST, M2+Kir3.4ST, M2−K 0-25 or M2−K 0-25+Kir3.4ST as indicated. The M2 agonist ACh was applied at 5 μM (black bar). Also, Pertussis Toxin (PTX) was co-expressed with membrane proteins where indicated. 3 mM Baryum (Ba²⁺) is used as a K channel blocker to confirm that currents arose from K channels.

[0535] FIG. 6b is a graph indicating the % change induced by ACh concentrations. Y-axis represents the percentage of change induced by ACh. First column represents M2+Kir3.4ST, second column represents M2+Kir3.4ST+PTX, third column represents M2−K 0-25 and fourth column represents M2−K 0-25+PTX. Results are means±standard error. * and ** represent significant differences.

[0536] FIG. 7 shows representative voltage clamp recordings from xenopus oocytes expressing K or M2 M2−K 0-25 as indicated, in outside out patches excised from oocytes membranes. The M2 agonist ACh was applied at 5 μM (black bar). Also, Pertussis Toxin (PTX) was co-expressed with membrane proteins where indicated. 3 mM Baryum (Ba²⁺) is used as a K channel blocker to confirm that currents arose from K channels.

[0537] FIG. 8a represents design and basic properties of hybrid proteins comprising M2 receptor and Kir6.2 ion channel. The sequences of the region linking M2 C-ter and Kir6.2 N-ter for experimental constructs are represented. The numbering indicated under the sequences corresponds to the numbering of amino acids of human M2 and mouse Kir6.2. The name of each construct is indicated at left. GGGGGGG represents a hexa-glycine linker; —

represents a single peptide bond.

[0538] M2+K indicates that M2 and Kir6.2 are not fused and are in their natural configuration.

[0539] M2−K indicates that M2 receptor, in its natural configuration, is fused to Kir6.2, in its natural configuration.

[0540] M2−K 5-20 indicates that M2 receptor deleted of its 5 last amino acids is fused to Kir6.2, deleted of its 20 first amino acids.

[0541] FIG. 8b shows representative two-electrode voltage clamp recordings from xenopus oocytes expressing M2−K 0-25 or M2−K 5-20 as indicated. The M2 agonist ACh was applied at 5 μM (black bar) and caused an increase in current for constructs M2−K 0-25 or M2−K 5-20. 3 mM Baryum (Ba²⁺) is used as a K channel blocker to confirm that currents arose from K channels.

[0542] FIG. 8c is a graph indicating the % change of current induced by ACh concentrations. Y-axis represents the percentage of change induced by ACh. First column represents M2+K, second column represents M2−K, third column represents M2−K 0-20, fourth column represents M2−K 0-25 and fifth column represents M2−K 5-20. Results are means±standard error. * and ** represent significant differences.

[0543] FIG. 9a represents design and basic properties of hybrids proteins comprising M2 receptor or D2 receptor, and Kir6.2 ion channel. The sequences of the region linking M2/D2 C-ter and Kir6.2 N-ter for experimental constructs are represented. The numbering indicated under the sequences corresponds to the numbering of amino acids of human M2 or D2 and mouse Kir6.2. The name of each construct is indicated at left. GGGGGG represents a hexa-glycine linker; represents a single peptide bond. —

[0544] D2-K 0-25 indicates that D2 receptor in its natural configuration is fused to Kir6.2, deleted of its 25 first amino acids.

[0545] FIG. 9b shows representative two-electrode voltage clamp recordings from xenopus oocytes expressing M2−K 0-25 or D2-K 0-20 as indicated. The M2 agonist ACh was applied at 5 μM (black bar) and caused an increase in current for constructs M2−K 0-25. Further, the D2 agonist Dopamine (Dopa) was applied at 5 μM (black bar) and caused an increase in current for constructs D2-K 0-25. 3 mM Baryum (Ba²⁺) is used as a K channel blocker to confirm that currents arose from K channels.

[0546] FIG. 9c is a graph indicating the % change of current induced by Dopamine concentrations. Y-axis represents the percentage of change induced by Dopamine. The first column represents D2+K, the second column represents M2−K 0-25 and the third column represents D2-K 0-25. Results are means±standard error. * represents significant differences.

[0547] FIG. 10a shows representative two-electrode voltage clamp recordings from xenopus oocytes expressing D2-K 0-25 or D2-K 0-25+Kir3.4ST as indicated. The D2 agonist Dopamine was applied at 5 μM (black bar). 3 mM Baryum (Ba²⁺) is used as a K channel blocker to confirm that currents arose from K channels.

[0548] FIG. 10b is a graph indicating the % change of current induced by Dopamine concentrations. Y-axis represents the percentage of change induced by Dopamine. The first column represents D2+K, the second column represents D2-K 0-25 and the third column represents D2-K 0-25+Kir3.4ST. Results are means±standard error. * represents significant differences.

[0549] FIG. 11 shows representative two-electrode voltage clamp recordings from xenopus oocytes expressing D2-K 0-25 as indicated. The D2 agonist Quinpirole (Quin) was applied at 5 μM. During Quin treatment, D2 antagonist Sulpiride was supplied at 5 μM. 3 mM Baryum (Ba²⁺) is used as a K channel blocker to confirm that currents arose from K channels

[0550] FIG. 12 shows representative two-electrode voltage clamp (TEVC) recordings from xenopus oocytes expressing β2-K Δ62-25 Ha as indicated. Bath contained 150 mM K⁺ and potential was set at −50 mV so that K⁺ currents are inward and represented by convention as negative (dashed line shows 0 current level). The β2 agonist Isoproterenol (Iso) was applied at 0.5 μM (black bar) and caused an increase in current. 3 mM Baryum (Ba²⁺) is used as a K channel blocker to confirm that currents arose from K channels.

[0551] FIG. 13 shows representative two-electrode voltage clamp (TEVC) recordings from xenopus oocytes expressing β2-K Δ73-25 Ha as indicated. Bath contained 150 mM K⁺ and potential was set at −50 mV so that K⁺ currents are inward and represented by convention as negative (dashed line shows 0 current level). The β2 agonist Isoproterenol (Iso) was applied at 0.5 μM (black bar) and caused an increase in current. 3 mM Baryum (Ba²⁺) is used as a K channel blocker to confirm that currents arose from K channels.

[0552] FIG. 14 shows representative two-electrode voltage clamp (TEVC) recordings from xenopus oocytes expressing CB1-K Δ0-25 Ha as indicated. Bath contained 150 mM K⁺ and potential was set at −50 mV so that K⁺ currents are inward and represented by convention as negative (dashed line shows 0 current level). The CB1 agonist WIN 55, 212-2 (W102) was applied at 1 μM (black bar) and caused an increase in current. 3 mM Baryum (Ba²⁺) is used as a K channel blocker to confirm that currents arose from K channels.

[0553] FIG. 15 shows representative two-electrode voltage clamp (TEVC) recordings from xenopus oocytes expressing D3-K Δ0-25 Ha as indicated. Bath contained 150 mM K⁺ and potential was set at −50 mV so that K⁺ currents are inward and represented by convention as negative (dashed line shows 0 current level). The D3 agonist Dopamine (Dopa) was applied at 1 μM (black bar) and caused an increase in current. 3 mM Baryum (Ba²⁺) is used as a K channel blocker to confirm that currents arose from K channels.

[0554] FIG. 16 represents the structure comparison of secondary conformation of Kir channels and Kv channels. Helices represent α-helices, arrows represents β-sheets. 1 represents the beginning of the amino acid sequence, and E represents the End of the amino acid sequence.

[0555] The structural homology between the two types of ions channels is grey boxed. In the grey box, A represents the cytoplasmic helices, inner and outer represents the two transmembrane helices and pore represent the pore helix.

[0556] FIG. 17 represents the sequence alignment of the human Kir ion channels.

### EXAMPLES

### Example 1

### Deleted Kir6.2 Ion Channel Comprised in Hybrid Protein is Able to Generate a Signal Upon Stimulation of Attached Receptor

[0557] In order to develop biosensors able to detect membrane receptor activation, the Inventors have developed hybrid proteins comprising membrane receptor fused to ion channel Kir6.2.

[0558] Kir6.2 ion channel was chosen, not only because it is part of a K_{ATP} channel, but also because it is a relatively simple, well-studied potassium (K⁺) channel that has the unique signature of being inhibited by intracellular ATP. This inhibiting property is a convenient feature that provides a straightforward means to identify the channel and control its open probability.

[0559] The first membrane receptor tested in the present invention is the muscarinic M2 receptor. This receptor is activated by the neurotransmitter acetylcholine (ACh), by the synthetic analogue Carbachol, and by the toxin Muscarine. It is blocked by atropine. M2 receptors are present in many tissues, including neurons and muscles. In heart, they mediate heart rate slowing upon vagal stimulation.

[0560] To test the efficiency of the fusion between membrane receptor and ion channel, many constructs have been constructed and in particular
[0561] M2−K
[0562] M2−K 0-20
[0563] M2−K 0-25
[0564] M2−K 0-30

[0565] The efficiency in the ability to generate an electrical signal upon ligand binding to the receptor was compared to the two non-fused proteins, i.e. in their natural configuration.

### A. Protein Engineering

[0566] M2−Kir6.2 fusion proteins were created by insertion of the human M2 coding sequence at the 5′ end of the Kir6.2 gene cloned in the pGH2 vector (derived from the pGEMHE vector optimized for protein expression from RNA in xenopus oocytes [Liman E R, Tytgat J, Hess P (1992) Subunit stoichiometry of a mammalian K⁺ channel determined by construction of multimeric cDNAs. Neuron. 9:861-71]. In a first PCR reaction, the human M2 gene was amplified with hybrid primers complementary to the M2 sequence at one extremity and the sites of insertion in pGH2-Kir6.2 at the other. The products of this reaction were gel-purified and served as primers for a second PCR with pGH2-Kir6.2 as template, yielding pGH2-M2−Kir6.2.

[0567] Using this construct as template, other constructs with shortened M2−Kir6.2 linkers were obtained by deletion of the appropriate codons with a single PCR reaction with hybrid primers flanking the deletion [Makarova O, Kamberov E, Margolis B (2000) Generation of deletion and point mutations with one primer in a single cloning step. Biotechniques. 29:970-2].

[0568] Reagents and conditions are from the QuikChange site-directed mutagenesis kit (Stratagene). Valid clones were identified by restriction enzyme profiling and verified by sequencing of the full open reading frame.

[0569] The hybrid proteins junctions are represented in FIG. 3a

[0570] The hybrid proteins were then expressed in Xenopus laevii oocytes, in order to measure their ability to generate an electrical signal upon ligand binding to the receptor.

### B. Hybrid Production and Transfection

[0571] cRNAs were produced in vitro with the T7 mMessage mMachine kit (Ambion), by using the cloned hybrid constructions described above

[0572] cRNA were purified by standard phenol/chloroform extraction, and quantified by agarose-gel electrophoresis and spectrophotometry

[0573] Xenopus oocytes defoliculated by collagenase treatment were microinjected with 50 nl of water containing one or a mixture of the following quantities of cRNA:

M2−Kir6.2 constructs, ˜5 ng;

### M2, ˜2 ng; and

### Kir6.2, ˜2 ng

[0574] Oocytes were incubated in individual wells in Barth's solution (KCl 1 mM, MgSO₄ 0.82 mM, NaCl 88 mM, NaHCO₃ 2.4 mM, CaCl₂ 0.41 mM, Ca(NO₃)₂ 0.3 mM, Hepes 16 mM, pH 7.4) supplemented with 100 U·ml⁻¹ penicillin, 100 μg ml⁻¹ streptomycin and 100 μml⁻¹ gentamycin, for at least 48 hrs at 19° C. before characterization.

[0575] Because of the inherent variability of the oocyte expression system, related experiments (e.g., with and without PTX) were alternated and performed on the same days with the same batches of oocytes.

[0576] After 48 h, electrophysiological measurement was performed in each type of injected oocytes.

### C. Electrophysiological Recordings.

[0577] Excised inside-out patch-clamp recordings were performed with symmetrical 150 mM K¹ as follows. Patch pipettes contained: 154 mM K⁺, 146 mM Cl⁻, 5 mM Mg²⁺ and 10 mM PIPES-KOH (pH 7.1). The cytoplasmic face of the patch was bathed in solutions containing 174 mM K⁺, 40 mM Cl⁻, 1 mM EGTA, 1 mM Mg²⁺, 10 mM PIPES-KOH (pH 7.1) and methanesulfonate as the remaining anion. ATP was added as specified. Membrane potential was held at −50 mV during all experiments. Application of various solutions to the patch was performed using a RSC-100 automated sewer pipes system (Bio-Logic). Pipe switching time was set at 250 ms. Data acquisition and analysis were performed using in-house software. Baseline fluctuations were removed by interactive fitting with a spline curve and subtraction of this fit with the signal. Non-linear curve fittings were performed with Origin software (OriginLab).

[0578] In the outside-out configuration, methods were identical and solutions were identical except that bath and pipette solutions were swapped and the pipette was supplemented with ATP as specified and 1 mM MgCl₂

[0579] Whole-cell currents were measured using two-electrode voltage clamp (TEVC). Microelectrodes were filled with 3 M KCl and oocytes were bathed in a solution having (in mM): 91 KCl, 1.8 CaCl₂, 1 MgCl2, 5 HEPES (pH 7.4) and 0.3 niflumic acid to block endogenous chloride current.

[0580] Unless otherwise specified, the concentration of M2 ligands was 5 μM.

[0581] Ba²⁺ (BaCl2) concentration was always 3 mM, a concentration sufficient to fully block Kir6.2 currents.

[0582] The TEVC voltage protocol consisted of 500-ms steps to −50, 0 and +50 mV—during which current was measured—repeated every 5 s, the holding potential being 0 mV.

[0583] Only the values measured at −50 mV are shown in the figures. Average values are presented as mean±s.e.m. Non-linear least-square curve fitting to the data points obtained at various concentrations of activating or inhibiting ligands was done using a standard Hill equation:

f(x)=a+b/[1+(K_{1/2}/x)^{z*h}],

where x is the concentration of ligand, a and b are scaling constants, z is either +1 for inhibition or −1 for activation, K_{1/2}, is the concentration for half-maximal effect and h is the Hill coefficient.

[0584] Ba²⁺ was used as a generic K⁺ channel blocker. Percent changes in current were calculated with respect to the baseline extrapolated from measurements of Ba²⁺-sensitive currents before and after agonist application. This method emphasizes reversibility and provides an underestimate of the true effects. For dose-response data, which were acquired by applying sequentially increasing concentrations of modulator to the same patch or oocyte, changes in current could only be measured with respect to the current before application, yielding somewhat larger values.

### D. Results

[0585] 1— N-ter deleted Kir6.2 Comprising Hybrid Protein is Able to Generate an Electrical Signal Upon stimulation of attached receptor

[0586] All oocytes were stimulated with acetylcholine for times ranging from 10 seconds to 5 minutes, and the variation of current was measured as described above.

[0587] FIG. 3b represents typical time courses of −50 mV currents measured in oocytes expressing M2+K, M2−K, M2−K 0-20, M2−K 0-25 and M2−K 0-30. FIG. 3c summarizes the results of these experiments.

[0588] As expected, M2+K co-expression does not generate any variation in current when oocytes are subjected to an application of acetylcholine. This co-expression corresponds to the negative control and shows that Kir6.2 is not regulated by the presence of ACh.

[0589] Whereas hybrid protein M2−K comprising membrane receptor and ion channel in their natural configuration does not show a detectable ACh response, hybrid proteins M2−K 0-20 and M2−K 0-25 show an increase in the measured current when oocytes are stimulated with ACh. The interpretation of these results is that the receptor and the ion channel within the hybrid protein must be sufficiently close for the ligand-induced conformational change of the receptor to be transduced into a conformational change of the ion channel sufficient to alter channel gating.

[0590] As shown in FIG. 3c, ACh responses increase with longer N-ter channel deletions. However, ACh responses are abrogated by large deletions, like the deletion of 30 amino acids of the hybrid protein M2−K 0-30, probably because such deletions alter key structural secondary structures of the ion channel. Optimal responses are obtained with deletions of 20 to 25 amino acids.

### 2—Membrane Receptor in its Natural Configuration Comprised in the Hybrid Protein Activates its Normal Signalling Pathway.

[0591] In cells, M2 receptor, in its normal configuration, is able to activate Kir3.4-S143T (Kir3.4ST) potassium channels, via the activation of a heterotrimeric G protein [Vivaudou M, Chan K W Sui J L, Jan L Y, Reuveny E, Logothetis D E (1997) Probing the G-protein regulation of GIRK1 and GIRK4, the two subunits of the K-ACh channel, using functional homomeric mutants. J Biol. Chem. 272: 31553-60]. When M2 receptor is activated, it becomes capable of activating associated heterotrimeric G proteins by catalyzing the binding of GTP to Gα and the subsequent release of the G protein subunits Gα and Gβγ. Gβγ in turn can bind to the cytosolic part of the Kir3.4ST channel and activate it. Kir3.4ST can thus serve as an indicator that a receptor is functional and it was used to test whether the receptor in hybrid proteins remained functional and indistinguishable from the unaltered, unfused receptor.

[0592] FIG. 4a illustrates such experiments.

[0593] In order to test if membrane receptor in its natural configuration is still able to activate its normal signaling pathway, when it is comprised in a hybrid protein, current generation was estimated in oocytes as described above.

[0594] Xenopus oocytes were transfected with M2−K or M2−K 0-30 hybrid protein with or without Kir3.4ST ion channel. FIG. 4b represents typical TEVC recordings from oocytes expressing the specified constructs and FIG. 4c shows the mean ACh-induced changes in current obtained in these experiments (error bars represent standard error of the mean; numbers above bars indicate the number of experiments considered; stars indicate a statistically significant difference at p<0.01). In oocytes expressing hybrid proteins only, no current variation was measured, after ACh stimulation, as expected because neither M2−K nor M2−K 0-30 display ACh response as shown above. However, when Kir3.4ST was coexpressed, oocytes expressing M2−K or M2−K 0-30 hybrid proteins displayed large ACh-induced currents indicative of Kir3.4ST activation by released G-protein subunits. We may reasonably extrapolate that the receptor in other hybrid proteins M2−K 0-20 and M2−K 0-25 would behave also as an unfused receptor.

[0595] These results allow to conclude:
[0596] than the absence of agonist-induced current generated by hybrid proteins wherein ion channel part is not deleted of the first N-terminus amino acids, or is deleted too much, is due to a dysfunction of the coupling between channel and receptor rather than a dysfunction of the membrane receptor part, and,
[0597] that membrane receptor comprised in hybrid proteins of the invention retains its ability to activate normal signaling pathway and therefore is functionally, and probably structurally, indistinguishable from the membrane receptor in its physiological form.

### 3—Hybrid Proteins Produce Distinct Signals for Receptor Agonists and Antagonists

[0598] Another question was to know whether hybrid proteins can distinguish between an agonist and an antagonist of the receptor.

[0599] Functionally active hybrid proteins M2−K 0-20 and M2−K 0-25, as well as M2+K proteins, were expressed in Xenopus oocytes, and stimulated with ACh and with an antagonist of ACh, atropine.

[0600] FIG. 5a shows typical TEVC recordings from oocytes expressing the specified constructs, and FIG. 5b summarizes these experiments (error bars represent sem; numbers above bars indicate the number of experiments considered; stars indicate a statistically significant difference at p<0.01).

[0601] To test the response to another agonist, we used another M2 activator, carbachol (CCh), and we further examined the CCh dose-response relation of the hybrid protein signals. FIG. 5c shows the dose response in % of the variation of current observed in Xenopus oocytes expressing M2+K, M2−K, M2−K 0-20, M2−K 0-25 or M2−K 0-30. The results clearly demonstrate that fusion proteins able to generate a current are stimulated, in a dose-dependent manner by the M2 agonist CCh. The values of affinities indicated in parenthesis correlate well with expected values from the literature.

[0602] The invention therefore permits to directly test antagonists as well as agonists and to obtain apparent affinities (or potencies).

### 4—The Communication Between Membrane Receptor and Ion Channel Parts of Hybrid Proteins is Direct.

[0603] The results represented above indicate that
[0604] a deletion of the N-terminus first amino acids of Kir6.2 are needed to generate a signal in response to binding of ligand to the attached receptor,
[0605] membrane receptor part remains fully functional within the hybrid protein as it retains the ability to activate normal signalling pathways that are activated by the membrane receptor in its natural configuration, and
[0606] agonists and antagonists of the membrane receptor modulate in opposite ways the current generated by the channel part of the hybrid protein.

[0607] A crucial question is whether the communication between the two parts of the hybrid protein is direct, or requires the presence of accessory messengers and proteins.

[0608] a—Use of G-Protein Inhibitors

[0609] The first approach to answer the above question was to use an inhibitor of the G-proteins Gi/o activated by the M2 receptor; the catalytic S1 subunit of Pertussis toxin (PTX). PTX blocks G-protein activation via M2 by ADP-rybosylating the alpha subunits of Gi/o G-proteins. The fusion protein M2-K 0-25 was expressed in Xenopus oocytes with or without co-expressed PTX. As a control, the unmodified M2 receptor was expressed in oocytes with Kir3.4ST with or without co-expressed PTX.

[0610] FIG. 6a shows typical TEVC recordings from oocytes expressing the specified constructs, and FIG. 6b summarizes these experiments (error bars represent sem; numbers above bars indicate the number of experiments considered; single star indicates a statistically significant difference at p<0.01 while double star indicates no significant difference).

[0611] In oocytes expressing M2+Kir3.4ST, ACh induces an increase in current that reflects the G-protein mediated activation of Kir3.4ST. This effect is abolished when oocytes co-expressed PTX, in agreement with the role of G-proteins in activation of Kir3.4ST.

[0612] In oocytes expressing M2−K 0-25, ACh induces an increase in current as described above. However, co-expressed PTX does not significantly modify the ACh-induced current.

[0613] These results indicate that the effect of ACh on the hybrid protein current does not involve G-proteins and is likely to be due to a direct, physical interaction between channel and receptor.

[0614] b—Cell-Free Current Measurement

[0615] Another way to test the direct transmission of signal from M2 to Kir6.2 upon application of ACh, is to test the effect of ACh in isolated patches of membrane where no signalling pathway involving soluble second messengers can be preserved. To this end, we used the excised outside-out configuration of the patch clamp technique. FIG. 7 shows typical current recordings measured in outside-out patches excised from oocytes expressing K, M2−K 0-25 or M2−K 0-25 with PTX. The application to the extracellular face of the membrane of 5 μM ACh has no effect on Kir6.2ΔC36 (K) as expected but it causes activation of M2−K 0-25 as in whole cells. This activation was preserved in the presence of PTX ruling out a G-protein mediated effect. Therefore, communication between receptor and channel is independent of G-proteins and soluble messengers and is likely direct.

[0616] This cell-free demonstration demonstrates that hybrid proteins can function in artificial lipid bilayers.

### Example 2

### Deletion of Last Amino Acids in the C-Terminus Part of Membrane Receptor does not Modify the Ability of Hybrid Protein to Generate a Signal

[0617] The previous example has illustrated the importance of limited deletions of the first N-terminal amino acids of Kir6.2 in signal generation.

[0618] In this example, the deletion of the last C-terminal amino acids of the membrane receptor is evaluated. The previously shown hybrid proteins were compared with the hybrid protein M2−K 5-20, wherein the M2 receptor deleted of the 5 last amino acids of the C-terminus is fused to Ki6.2 deleted of the first 20 first amino acids of the N-terminus. FIG. 8a represents the junction between the two proteins.

[0619] FIG. 8b shows typical TEVC recordings from oocytes expressing the specified constructs, and FIG. 8c summarizes these experiments (error bars represent sem; numbers above bars indicate the number of experiments considered; single star indicates a statistically significant difference from 0 at p<0.05 while double stars indicate a statistically significant difference from 0 at p<0.01).

[0620] These results demonstrate that a deletion in the C-terminus of the membrane receptor comprised in the hybrid protein does not affect its ability to generate a receptor-dependent signal.

### Example 3

### Hybrid Protein Comprising Kir6.2 and D2 Dopaminergic Receptor

[0621] So far, hybrid proteins incorporating the M2 receptor have been demonstrated. To prove the general nature of the invention, a distinct receptor was used to construct hybrid protein. Because a deletion of 25 amino acids from Kir6.2 was optimal, we directly constructed the hybrid protein D2-K 0.25 described in FIG. 9a and tested the effects of the physiological agonist Dopamine (Dopa).

[0622] FIG. 9b represents typical time courses of −50 mV currents measured in oocytes expressing M2−K 0-25 or D2-K 0.25. FIG. 9c summarizes these experiments (error bars represent sem; numbers above bars indicate the number of experiments considered; single star indicates a statistically significant difference from 0 at p<0.01). M2−K 0-25 responds to ACh as shown above and is insensitive to Dopa, not known as a M2 effector. In contrast, D2-K 0-25 responds to Dopa (5 μM) and is insensitive to ACh, not known as a D2 effector. As opposed to the effect of ACh on M2−K 0-24, Dopa caused a decrease in current of D2-K 0-25. Although the signal is opposite, it remains clearly detectable. This inhibition of D2-K 0-25 was dependent on the dopamine concentration (K_{1/2}=73 nM, n=6; Data not shown)

[0623] Like M2, the fused D2 receptor could still function as a GPCR as ascertained by its capacity to mediate activation of Kir3.4 ST. This is shown in FIG. 10.

[0624] FIG. 10a shows typical TEVC recordings from oocytes expressing the specified constructs, and FIG. 10b summarizes these experiments (error bars represent sem; numbers next to bars indicate the number of experiments considered; single star indicates a statistically significant difference from 0 at p<0.01).

[0625] The effect of dopamine was reproduced with quinpirole, a stable agonist of dopaminergic receptors, and could be prevented by the antagonist sulpiride. This is shown in FIG. 11 with a typical TEVC recording from an oocyte expressing D2-K 0-25 where quinpirole (5 μM) induces a decrease in current which is reversed by sulpiride (5 μM).

[0626] Therefore, D2-K 0-25 appears as another GPCR-Kir6.2 fusion protein sensitive to agonists and antagonists, further validating the concept of GPCR-channel hybrid proteins. Our data are consistent with a purely mechanical transduction from the GPCR ligand binding site to the channel gate.

### Example 4

### Hybrid Protein Comprising Kir6.2 and β2 Adrenergic Receptor Deleted in its C-Terminus Part

[0627] As demonstrated above, the deletion of C-terminus part of the M2 membrane receptor fused to the N-terminus deleted Kir6.2 ion channel does not affect the electric signal generated by the hybrid protein consisting in full length M2 receptor fused to the N-terminus deleted Kir6.2 ion channel.

[0628] To confirm these results, new hybrid proteins comprising as membrane receptor the human β2 adrenergic receptor deleted in its C-terminus.

[0629] Two hybrid proteins have been constructed and correspond to the following constructions:
[0630] β2-Kir6.2Δ 62-25 Ha: β2 adrenergic receptor deleted of its 62 last amino acids is fused to Kir6.2 receptor which is deleted of the 25 amino acids in its N-terminus part and is deleted of its 36 amino acids in its C-Terminus part, and containing a Ha tag, and
[0631] β2-Kir6.2Δ 73-25 Ha: β2 adrenergic receptor deleted of its 73 last amino acids is fused to Kir6.2 receptor which is deleted of the 25 amino acids in its N-terminus part and is deleted of its 36 amino acids in its C-Terminus part, and containing a Ha tag.

[0632] The expression the β2-Kir6.2 constructs was achieved as mentioned in Example 1.

[0633] Cells expressing the constructs were stimulated with an agonist of the β2 receptor: Isoproterenol, at a final concentration 0.5 μM. The current variation was measured and the reaction was stopped by adding 3 mM Ba²⁺.

[0634] Results are shown in FIGS. 12 and 13.

[0635] Like the previous constructions, the fused β2 receptor is able to respond to stimulation and to generate an electric signal.

### Example 5

### Hybrid Protein Comprising Kir6.2 and CB1 Canabinoid Receptor Deleted or not in its C-Terminus Part

[0636] To extend the generalization of the membrane receptor-potassium channel, new constructs have been achieved by the Inventors.

[0637] CB 1 canabinoïd receptor has been fused to the Kir6.2 ion channel deleted in its N-terminus part. The constructions tested are the following ones:
[0638] CB1-Kir6.2Δ 0-25 Ha: CB1 canabinoïd receptor is fused to Kir6.2 receptor which is deleted of the 25 amino acids in its N-terminus part and is deleted of its 36 amino acids in its C-Terminus part, and containing a Ha tag, and
[0639] CB1-Kir6.2Δ 48-25 Ha: CB1 canabinoïd receptor deleted of its 48 last amino acids is fused to Kir6.2 receptor which is deleted of the 25 amino acids in its N-terminus part and is deleted of its 36 amino acids in its C-Terminus part, and containing a Ha tag.

[0640] The expression the CB1-Kir6.2 constructs was achieved as mentioned in Example 1.

[0641] Cells expressing the above constructs were stimulated with an agonist of the CB1 receptor: WIN 55, 212-2 (Sigma), at a final concentration 1 μM. The current variation was measured and the reaction was stopped by adding 3 mM Ba²⁺.

[0642] Results for CB1-Kir6.2Δ 0-25 Ha are shown in FIG. 14. CB1-Kir6.2Δ 48-25 Ha construct gives similar results.

[0643] Thus, another GPCR class A receptor, deleted or not in its C terminus part, is able to generate a potassium current when it is fused to a N-terminus deleted Kir6.2 ion channel.

### Example 6

### Hybrid Protein Comprising Kir6.2 and D3 Dopaminergic Receptor

[0644] Another GPCR receptor has been fused to Kir6.2 ion channel:

[0645] D3-KΔ 0-25 HA: D3 dopaminergic receptor is fused to Kir6.2 receptor which is deleted of the 25 amino acids in its N-terminus part and is deleted of its 36 amino acids in its C-Terminus part, and containing a Ha tag.

[0646] The expression the D3-Kir6.2 construct was achieved as mentioned in Example 1.

[0647] Cells expressing the above constructs were stimulated with dopamine, at a final concentration 0.3 μM.

[0648] The current variation was measured and the reaction was stopped by adding 3 mM Ba²⁺.

[0649] Results are shown in FIG. 15.

[0650] Again, a fusion between a class A GPCR and Kir6.2 deleted in its N-terminus part allows the generation of an electric flux, after stimulating the receptor.

### Example 7

### Hybrid Protein Comprising Kir6.2 and CCR2 Chemokine Receptor

[0651] Fusion protein consisting in CCR2 chemokine receptor has been fused to Kir6.2 deleted in its N-terminus part allows the generation of an electric flux, after stimulating the receptor by CCR2 agonist: CCL2 or MCP1, at a final concentration from about 0.3 μM to about at a final concentration 2 μM.

### Example 8

### Hybrid Protein Comprising Kir3.2 and M2 Muscarinic Receptor

[0652] In order to demonstrate that the above constructions fusing class A GPCR to Kir ion channel are not restricted to Kir6.2 ion channel, the hybrid protein M2−Kir3.2Δ 0-46 has been constructed.

[0653] By homology to the N-terminus Kir6.2 sequence, which is represented in FIG. 16, Kir3.2 deletion of 46 amino acids has demonstrated the same results as the deletion of 25 amino acids in Kir6.2: an hybrid protein M2−Kir3.2 0-46, when stimulated with Ach, is able to generate an electrical flux.

### Example 9

### Hybrid Protein Comprising Kv.1 and M2 Muscarinic Receptor

[0654] In order to demonstrate that the fusion can be generalized to potassium voltage dependant ion channel, a construction between M2 receptor and Kir1.1 ion channel has been made.

[0655] Kv1.1 ion channel is deleted in its N-terminus part of the 268 first amino acids, which corresponds to the 25 amino acids deleted in Kir6.2.

[0656] The M2−Kv1.1 0-268, when stimulated by Ach, is able to generate an electrical current.

[0657] Thus fusions between class A GPCR and K⁺ ion channels belonging to the Kir family or Kv family can serve as biomarquer for detecting the activity of class A GPCR receptors.

The application's sequence listing, which the Patent Office published only in electronic form, follows.

SEQUENCE LISTING (234 sequences)

SEQ ID NO: 1 - DNA, 1173 bp, Mus musculus
  CDS (1)..(1173)
atgctgtcccgaaagggcattatccctgaggaatatgtgctgacccggctggcagaggaccctgcagagcccaggtaccgtactcgagagaggagggcccgcttcgtgtccaagaaaggcaactgcaacgtcgcccacaagaacattcgagagcagggccgcttcctgcaggatgtgttcaccacgctggtggacctcaaatggccacacactctgctcattttcaccatgtccttcctgtgcagctggctgctctttgccatggtctggtggctcatcgccttcgcccacggtgacctggcccccggagagggcaccaatgtgccctgcgtcacaagcatccactccttttcatctgccttccttttctccatcgaggtccaggtgaccattggtttcggcgggcgcatggtgacagaggaatgtcccctggccatcctcattctcattgtgcagaatatcgtcgggctgatgatcaacgccatcatgctgggctgcatcttcatgaaaacggcccaggcccatcggcgggcagaaaccctcatcttcagcaagcatgctgtgatcaccctgcgccatggccgcctgtgcttcatgctgcgcgtaggggacctccgaaagagcatgatcattagcgccaccatccacatgcaggtggtgcgcaagaccaccagccccgagggcgaagttgtgcctctccaccaggtagacatccccatggagaatggcgtgggtggtaacggcatcttcctggtggccccactcatcatctaccacgtcatcgactccaacagcccgctctacgacctggctcctagtgacctgcaccaccaccaggacctggagatcattgtcatcttggaaggcgtggtagaaaccacgggcatcaccacccaggcccgcacctcctacctagctgacgagattctatgggggcagcgctttgtccccattgtggccgaggaggacggccgctattctgtggactactccaaatttggtaacaccattaaagtgcccacaccactctgcacagcccgccagcttgatgaggaccgcagtctgctggatgccctgaccctcgcctcgtcgcgggggcccctgcgcaagcgcagtgtggctgtggcgaaggccaagcccaagtttagcatctctccagattccttgtcctga

SEQ ID NO: 2 - protein, 390 aa, Mus musculus
MLSRKGIIPEEYVLTRLAEDPAEPRYRTRERRARFVSKKGNCNVAHKNIREQGRFLQDVFTTLVDLKWPHTLLIFTMSFLCSWLLFAMVWWLIAFAHGDLAPGEGTNVPCVTSIHSFSSAFLFSIEVQVTIGFGGRMVTEECPLAILILIVQNIVGLMINAIMLGCIFMKTAQAHRRAETLIFSKHAVITLRHGRLCFMLRVGDLRKSMIISATIHMQVVRKTTSPEGEVVPLHQVDIPMENGVGGNGIFLVAPLIIYHVIDSNSPLYDLAPSDLHHHQDLEIIVILEGVVETTGITTQARTSYLADEILWGQRFVPIVAEEDGRYSVDYSKFGNTIKVPTPLCTARQLDEDRSLLDALTLASSRGPLRKRSVAVAKAKPKFSISPDSLS

SEQ ID NO: 3 - DNA, 1062 bp, Mus musculus
  CDS (1)..(1062)
atgctgtcccgaaagggcattatccctgaggaatatgtgctgacccggctggcagaggaccctgcagagcccaggtaccgtactcgagagaggagggcccgcttcgtgtccaagaaaggcaactgcaacgtcgcccacaagaacattcgagagcagggccgcttcctgcaggatgtgttcaccacgctggtggacctcaaatggccacacactctgctcattttcaccatgtccttcctgtgcagctggctgctctttgccatggtctggtggctcatcgccttcgcccacggtgacctggcccccggagagggcaccaatgtgccctgcgtcacaagcatccactccttttcatctgccttccttttctccatcgaggtccaggtgaccattggtttcggcgggcgcatggtgacagaggaatgtcccctggccatcctcattctcattgtgcagaatatcgtcgggctgatgatcaacgccatcatgctgggctgcatcttcatgaaaacggcccaggcccatcggcgggcagaaaccctcatcttcagcaagcatgctgtgatcaccctgcgccatggccgcctgtgcttcatgctgcgcgtaggggacctccgaaagagcatgatcattagcgccaccatccacatgcaggtggtgcgcaagaccaccagccccgagggcgaagttgtgcctctccaccaggtagacatccccatggagaatggcgtgggtggtaacggcatcttcctggtggccccactcatcatctaccacgtcatcgactccaacagcccgctctacgacctggctcctagtgacctgcaccaccaccaggacctggagatcattgtcatcttggaaggcgtggtagaaaccacgggcatcaccacccaggcccgcacctcctacctagctgacgagattctatgggggcagcgctttgtccccattgtggccgaggaggacggccgctattctgtggactactccaaatttggtaacaccattaaagtgcccacaccactctgcacagcccgccagcttgatgaggaccgcagt

SEQ ID NO: 4 - protein, 354 aa, Mus musculus
MLSRKGIIPEEYVLTRLAEDPAEPRYRTRERRARFVSKKGNCNVAHKNIREQGRFLQDVFTTLVDLKWPHTLLIFTMSFLCSWLLFAMVWWLIAFAHGDLAPGEGTNVPCVTSIHSFSSAFLFSIEVQVTIGFGGRMVTEECPLAILILIVQNIVGLMINAIMLGCIFMKTAQAHRRAETLIFSKHAVITLRHGRLCFMLRVGDLRKSMIISATIHMQVVRKTTSPEGEVVPLHQVDIPMENGVGGNGIFLVAPLIIYHVIDSNSPLYDLAPSDLHHHQDLEIIVILEGVVETTGITTQARTSYLADEILWGQRFVPIVAEEDGRYSVDYSKFGNTIKVPTPLCTARQLDEDRS

SEQ ID NO: 5 - DNA, 1206 bp, Mus musculus
  CDS (1)..(1206)
atgctgtcccgaaagggcattatccctgaggaatatgtgctgacccggctggcagaggaccctgcagagcccaggtaccgtactcgagagaggagggcccgcttcgtgtccaagaaaggcaactgcaacgtcgcccacaagaacattcgagagcagggccgcttcctgcaggatgtgttcaccacgctggtggacctcaaatggccacacactctgctcattttcaccatgtccttcctgtgcagctggctgctctttgccatggtctggtggctcatcgccttcgcccacggtgatctctatgcttacatggagaaaggcatcacggacctggcccccggagagggcaccaatgtgccctgcgtcacaagcatccactccttttcatctgccttccttttctccatcgaggtccaggtgaccattggtttcggcgggcgcatggtgacagaggaatgtcccctggccatcctcattctcattgtgcagaatatcgtcgggctgatgatcaacgccatcatgctgggctgcatcttcatgaaaacggcccaggcacatcggcgggcagaaaccctcatcttcagcaagcatgctgtgatcaccctgcgccatggccgcctgtgcttcatgctgcgcgtaggggacctccgaaagagcatgatcattagcgccaccatccacatgcaggtggtgcgcaagaccaccagccccgagggcgaagttgtgcctctccaccaggtagacatccccatggagaatggcgtgggtggtaacggcatcttcctggtggccccactcatcatctaccacgtcatcgactccaacagcccgctctacgacctggctcctagtgacctgcaccaccaccaggacctggagatcattgtcatcttggaaggcgtggtagaaaccacgggcatcaccacccaggcccgcacctcctacctagctgacgagattctatgggggcagcgctttgtccccattgtggccgaggaggacggccgctattctgtggactactccaaatttggtaacaccattaaagtgcccacaccactctgcacagcccgccagcttgatgaggaccgcagtctgctggatgccctgaccctcgcctcgtcgcgggggcccctgcgcaagcgcagtgtggctgtggcgaaggccaagcccaagtttagcatctctccagattccttgtcctga

SEQ ID NO: 6 - protein, 401 aa, Mus musculus
MLSRKGIIPEEYVLTRLAEDPAEPRYRTRERRARFVSKKGNCNVAHKNIREQGRFLQDVFTTLVDLKWPHTLLIFTMSFLCSWLLFAMVWWLIAFAHGDLYAYMEKGITDLAPGEGTNVPCVTSIHSFSSAFLFSIEVQVTIGFGGRMVTEECPLAILILIVQNIVGLMINAIMLGCIFMKTAQAHRRAETLIFSKHAVITLRHGRLCFMLRVGDLRKSMIISATIHMQVVRKTTSPEGEVVPLHQVDIPMENGVGGNGIFLVAPLIIYHVIDSNSPLYDLAPSDLHHHQDLEIIVILEGVVETTGITTQARTSYLADEILWGQRFVPIVAEEDGRYSVDYSKFGNTIKVPTPLCTARQLDEDRSLLDALTLASSRGPLRKRSVAVAKAKPKFSISPDSLS

SEQ ID NO: 7 - DNA, 1095 bp, Mus musculus
  CDS (1)..(1095)
atgctgtcccgaaagggcattatccctgaggaatatgtgctgacccggctggcagaggaccctgcagagcccaggtaccgtactcgagagaggagggcccgcttcgtgtccaagaaaggcaactgcaacgtcgcccacaagaacattcgagagcagggccgcttcctgcaggatgtgttcaccacgctggtggacctcaaatggccacacactctgctcattttcaccatgtccttcctgtgcagctggctgctctttgccatggtctggtggctcatcgccttcgcccacggtgatctctatgcttacatggagaaaggcatcacggacctggcccccggagagggcaccaatgtgccctgcgtcacaagcatccactccttttcatctgccttccttttctccatcgaggtccaggtgaccattggtttcggcgggcgcatggtgacagaggaatgtcccctggccatcctcattctcattgtgcagaatatcgtcgggctgatgatcaacgccatcatgctgggctgcatcttcatgaaaacggcccaggcacatcggcgggcagaaaccctcatcttcagcaagcatgctgtgatcaccctgcgccatggccgcctgtgcttcatgctgcgcgtaggggacctccgaaagagcatgatcattagcgccaccatccacatgcaggtggtgcgcaagaccaccagccccgagggcgaagttgtgcctctccaccaggtagacatccccatggagaatggcgtgggtggtaacggcatcttcctggtggccccactcatcatctaccacgtcatcgactccaacagcccgctctacgacctggctcctagtgacctgcaccaccaccaggacctggagatcattgtcatcttggaaggcgtggtagaaaccacgggcatcaccacccaggcccgcacctcctacctagctgacgagattctatgggggcagcgctttgtccccattgtggccgaggaggacggccgctattctgtggactactccaaatttggtaacaccattaaagtgcccacaccactctgcacagcccgccagcttgatgaggaccgcagt

SEQ ID NO: 8 - protein, 365 aa, Mus musculus
MLSRKGIIPEEYVLTRLAEDPAEPRYRTRERRARFVSKKGNCNVAHKNIREQGRFLQDVFTTLVDLKWPHTLLIFTMSFLCSWLLFAMVWWLIAFAHGDLYAYMEKGITDLAPGEGTNVPCVTSIHSFSSAFLFSIEVQVTIGFGGRMVTEECPLAILILIVQNIVGLMINAIMLGCIFMKTAQAHRRAETLIFSKHAVITLRHGRLCFMLRVGDLRKSMIISATIHMQVVRKTTSPEGEVVPLHQVDIPMENGVGGNGIFLVAPLIIYHVIDSNSPLYDLAPSDLHHHQDLEIIVILEGVVETTGITTQARTSYLADEILWGQRFVPIVAEEDGRYSVDYSKFGNTIKVPTPLCTARQLDEDRS

SEQ ID NO: 9 - DNA, 1401 bp, Homo sapiens
  CDS (1)..(1401)
atgaataactcaacaaactcctctaacaatagcctggctcttacaagtccttataagacatttgaagtggtgtttattgtcctggtggctggatccctcagtttggtgaccattatcgggaacatcctagtcatggtttccattaaagtcaaccgccacctccagaccgtcaacaattactttttattcagcttggcctgtgctgaccttatcataggtgttttctccatgaacttgtacaccctctacactgtgattggttactggcctttgggacctgtggtgtgtgacctttggctagccctggactatgtggtcagcaatgcctcagttatgaatctgctcatcatcagctttgacaggtacttctgtgtcacaaaacctctgacctacccagtcaagcggaccacaaaaatggcaggtatgatgattgcagctgcctgggtcctctctttcatcctctgggctccagccattctcttctggcagttcattgtaggggtgagaactgtggaggatggggagtgctacattcagtttttttccaatgctgctgtcacctttggtacggctattgcagccttctatttgccagtgatcatcatgactgtgctatattggcacatatcccgagccagcaagagcaggataaagaaggacaagaaggagcctgttgccaaccaagaccccgtttctccaagtctggtacaaggaaggatagtgaagccaaacaataacaacatgcccagcagtgacgatggcctggagcacaacaaaatccagaatggcaaagcccccagggatcctgtgactgaaaactgtgttcagggagaggagaaggagagctccaatgactccacctcagtcagtgctgttgcctctaatatgagagatgatgaaataacccaggatgaaaacacagtttccacttccctgggccattccaaagatgagaactctaagcaaacatgcatcagaattggcaccaagaccccaaaaagtgactcatgtaccccaactaataccaccgtggaggtagtggggtcttcaggtcagaatggagatgaaaagcagaatattgtagcccgcaagattgtgaagatgactaagcagcctgcaaaaaagaagcctcctccttcccgggaaaagaaagtcaccaggacaatcttggctattctgttggctttcatcatcacttgggccccatacaatgtcatggtgctcattaacaccttttgtgcaccttgcatccccaacactgtgtggacaattggttactggctttgttacatcaacagcactatcaaccctgcctgctatgcactttgcaatgccaccttcaagaagacctttaaacaccttctcatgtgtcattataagaacataggcgctacaaggtaa

SEQ ID NO: 10 - protein, 466 aa, Homo sapiens
MNNSTNSSNNSLALTSPYKTFEVVFIVLVAGSLSLVTIIGNILVMVSIKVNRHLQTVNNYFLFSLACADLIIGVFSMNLYTLYTVIGYWPLGPVVCDLWLALDYVVSNASVMNLLIISFDRYFCVTKPLTYPVKRTTKMAGMMIAAAWVLSFILWAPAILFWQFIVGVRTVEDGECYIQFFSNAAVTFGTAIAAFYLPVIIMTVLYWHISRASKSRIKKDKKEPVANQDPVSPSLVQGRIVKPNNNNMPSSDDGLEHNKIQNGKAPRDPVTENCVQGEEKESSNDSTSVSAVASNMRDDEITQDENTVSTSLGHSKDENSKQTCIRIGTKTPKSDSCTPTNTTVEVVGSSGQNGDEKQNIVARKIVKMTKQPAKKKPPPSREKKVTRTILAILLAFIITWAPYNVMVLINTFCAPCIPNTVWTIGYWLCYINSTINPACYALCNATFKKTFKHLLMCHYKNIGATR

SEQ ID NO: 11 - DNA, 1242 bp, Homo sapiens
  CDS (1)..(1242)
atggggcaacccgggaacggcagcgccttcttgctggcacccaatagaagccatgcgccggaccacgacgtcacgcagcaaagggacgaggtgtgggtggtgggcatgggcatcgtcatgtctctcatcgtcctggccatcgtgtttggcaatgtgctggtcatcacagccattgccaagttcgagcgtctgcagacggtcaccaactacttcatcacttcactggcctgtgctgatctggtcatgggcctggcagtggtgccctttggggccgcccatattcttatgaaaatgtggacttttggcaacttctggtgcgagttttggacttccattgatgtgctgtgcgtcacggccagcattgagaccctgtgcgtgatcgcagtggatcgctactttgccattacttcacctttcaagtaccagagcctgctgaccaagaataaggcccgggtgatcattctgatggtgtggattgtgtcaggccttacctccttcttgcccattcagatgcactggtaccgggccacccaccaggaagccatcaactgctatgccaatgagacctgctgtgacttcttcacgaaccaagcctatgccattgcctcttccatcgtgtccttctacgttcccctggtgatcatggtcttcgtctactccagggtctttcaggaggccaaaaggcagctccagaagattgacaaatctgagggccgcttccatgtccagaaccttagccaggtggagcaggatgggcggacggggcatggactccgcagatcttccaagttctgcttgaaggagcacaaagccctcaagacgttaggcatcatcatgggcactttcaccctctgctggctgcccttcttcatcgttaacattgtgcatgtgatccaggataacctcatccgtaaggaagtttacatcctcctaaattggataggctatgtcaattctggtttcaatccccttatctactgccggagcccagatttcaggattgccttccaggagcttctgtgcctgcgcaggtcttctttgaaggcctatgggaatggctactccagcaacggcaacacaggggagcagagtggatatcacgtggaacaggagaaagaaaataaactgctgtgtgaagacctcccaggcacggaagactttgtgggccatcaaggtactgtgcctagcgataacattgattcacaagggaggaattgtagtacaaatgactcactgctgtaa

SEQ ID NO: 12 - protein, 413 aa, Homo sapiens
MGQPGNGSAFLLAPNRSHAPDHDVTQQRDEVWVVGMGIVMSLIVLAIVFGNVLVITAIAKFERLQTVTNYFITSLACADLVMGLAVVPFGAAHILMKMWTFGNFWCEFWTSIDVLCVTASIETLCVIAVDRYFAITSPFKYQSLLTKNKARVIILMVWIVSGLTSFLPIQMHWYRATHQEAINCYANETCCDFFTNQAYAIASSIVSFYVPLVIMVFVYSRVFQEAKRQLQKIDKSEGRFHVQNLSQVEQDGRTGHGLRRSSKFCLKEHKALKTLGIIMGTFTLCWLPFFIVNIVHVIQDNLIRKEVYILLNWIGYVNSGFNPLIYCRSPDFRIAFQELLCLRRSSLKAYGNGYSSNGNTGEQSGYHVEQEKENKLLCEDLPGTEDFVGHQGTVPSDNIDSQGRNCSTNDSLL

SEQ ID NO: 13 - DNA, 1332 bp, Homo sapiens
  CDS (1)..(1332)
atggatccactgaatctgtcctggtatgatgatgatctggagaggcagaactggagccggcccttcaacgggtcagacgggaaggcggacagaccccactacaactactatgccacactgctcaccctgctcatcgctgtcatcgtcttcggcaacgtgctggtgtgcatggctgtgtcccgcgagaaggcgctgcagaccaccaccaactacctgatcgtcagcctcgcagtggccgacctcctcgtcgccacactggtcatgccatgggttgtctacctggaggtggtaggtgagtggaaattcagcaggattcactgtgacatcttcgtcactctggacgtcatgatgtgcacggcgagcatcctgaacttgtgtgccatcagcatcgacaggtacacagctgtggccatgcccatgctgtacaatacgcgctacagctccaagcgccgggtcaccgtcatgatctccatcgtctgggtcctgtccttcaccatctcctgcccactcctcttcggactcaataacgcagaccagaacgagtgcatcattgccaacccggccttcgtggtctactcctccatcgtctccttctacgtgcccttcattgtcaccctgctggtctacatcaagatctacattgtcctccgcagacgccgcaagcgagtcaacaccaaacgcagcagccgagctttcagggcccacctgagggctccactaaagggcaactgtactcaccccgaggacatgaaactctgcaccgttatcatgaagtctaatgggagtttcccagtgaacaggcggagagtggaggctgcccggcgagcccaggagctggagatggagatgctctccagcaccagcccacccgagaggacccggtacagccccatcccacccagccaccaccagctgactctccccgacccgtcccaccacggtctccacagcactcctgacagccccgccaaaccagagaagaatgggcatgccaaagaccaccccaagattgccaagatctttgagatccagaccatgcccaatggcaaaacccggacctccctcaagaccatgagccgtagaaagctctcccagcagaaggagaagaaagccactcagatgctcgccattgttctcggcgtgttcatcatctgctggctgcccttcttcatcacacacatcctgaacatacactgtgactgcaacatcccgcctgtcctgtacagcgccttcacgtggctgggctatgtcaacagcgccgtgaaccccatcatctacaccaccttcaacattgagttccgcaaggccttcctgaagatccttcactgctga

SEQ ID NO: 14 - protein, 443 aa, Homo sapiens
MDPLNLSWYDDDLERQNWSRPFNGSDGKADRPHYNYYATLLTLLIAVIVFGNVLVCMAVSREKALQTTTNYLIVSLAVADLLVATLVMPWVVYLEVVGEWKFSRIHCDIFVTLDVMMCTASILNLCAISIDRYTAVAMPMLYNTRYSSKRRVTVMISIVWVLSFTISCPLLFGLNNADQNECIIANPAFVVYSSIVSFYVPFIVTLLVYIKIYIVLRRRRKRVNTKRSSRAFRAHLRAPLKGNCTHPEDMKLCTVIMKSNGSFPVNRRRVEAARRAQELEMEMLSSTSPPERTRYSPIPPSHHQLTLPDPSHHGLHSTPDSPAKPEKNGHAKDHPKIAKIFEIQTMPNGKTRTSLKTMSRRKLSQQKEKKATQMLAIVLGVFIICWLPFFITHILNIHCDCNIPPVLYSAFTWLGYVNSAVNPIIYTTFNIEFRKAFLKILHC

SEQ ID NO: 15 - DNA, 1266 bp, Homo sapiens
  CDS (1)..(1266)
atggatgtgctcagccctggtcagggcaacaacaccacatcaccaccggctccctttgagaccggcggcaacactactggtatctccgacgtgaccgtcagctaccaagtgatcacctctctgctgctgggcacgctcatcttctgcgcggtgctgggcaatgcgtgcgtggtggctgccatcgccttggagcgctccctgcagaacgtggccaattatcttattggctctttggcggtcaccgacctcatggtgtcggtgttggtgctgcccatggccgcgctgtatcaggtgctcaacaagtggacactgggccaggtaacctgcgacctgttcatcgccctcgacgtgctgtgctgcacctcatccatcttgcacctgtgcgccatcgcgctggacaggtactgggccatcacggaccccatcgactacgtgaacaagaggacgccccggccgcgtgcgctcatctcgctcacttggcttattggcttcctcatctctatcccgcccatcctgggctggcgcaccccggaagaccgctcggaccccgacgcatgcaccattagcaaggatcatggctacactatctattccacctttggagctttctacatcccgctgctgctcatgctggttctctatgggcgcatattccgagctgcgcgcttccgcatccgcaagacggtcaaaaaggtggagaagaccggagcggacacccgccatggagcatctcccgccccgcagcccaagaagagtgtgaatggagagtcggggagcaggaactggaggctgggcgtggagagcaaggctgggggtgctctgtgcgccaatggcgcggtgaggcaaggtgacgatggcgccgccctggaggtgatcgaggtgcaccgagtgggcaactccaaagagcacttgcctctgcccagcgaggctggtcctaccccttgtgcccccgcctctttcgagaggaaaaatgagcgcaacgccgaggcgaagcgcaagatggccctggcccgagagaggaagacagtgaagacgctgggcatcatcatgggcaccttcatcctctgctggctgcccttcttcatcgtggctcttgttctgcccttctgcgagagcagctgccacatgcccaccctgttgggcgccataatcaattggctgggctactccaactctctgcttaaccccgtcatttacgcatacttcaacaaggactttcaaaacgcgtttaagaagatcattaagtgtaacttctgccgccagtga

SEQ ID NO: 16 - protein, 421 aa, Homo sapiens
MDVLSPGQGNNTTSPPAPFETGGNTTGISDVTVSYQVITSLLLGTLIFCAVLGNACVVAAIALERSLQNVANYLIGSLAVTDLMVSVLVLPMAALYQVLNKWTLGQVTCDLFIALDVLCCTSSILHLCAIALDRYWAITDPIDYVNKRTPRPRALISLTWLIGFLISIPPILGWRTPEDRSDPDACTISKDHGYTIYSTFGAFYIPLLLMLVLYGRIFRAARFRIRKTVKKVEKTGADTRHGASPAPQPKKSVNGESGSRNWRLGVESKAGGALCANGAVRQGDDGAALEVIEVHRVGNSKEHLPLPSEAGPTPCAPASFERKNERNAEAKRKMALARERKTVKTLGIIMGTFILCWLPFFIVALVLPFCESSCHMPTLLGAIINWLGYSNSLLNPVIYAYFNKDFQNAFKKIIKCNFCRQ

SEQ ID NO: 17 - DNA, 1059 bp, Homo sapiens
  CDS (1)..(1059)
atggaggggatcagtatatacacttcagataactacaccgaggaaatgggctcaggggactatgactccatgaaggaaccctgtttccgtgaagaaaatgctaatttcaataaaatcttcctgcccaccatctactccatcatcttcttaactggcattgtgggcaatggattggtcatcctggtcatgggttaccagaagaaactgagaagcatgacggacaagtacaggctgcacctgtcagtggccgacctcctctttgtcatcacgcttcccttctgggcagttgatgccgtggcaaactggtactttgggaacttcctatgcaaggcagtccatgtcatctacacagtcaacctctacagcagtgtcctcatcctggccttcatcagtctggaccgctacctggccatcgtccacgccaccaacagtcagaggccaaggaagctgttggctgaaaaggtggtctatgttggcgtctggatccctgccctcctgctgactattcccgacttcatctttgccaacgtcagtgaggcagatgacagatatatctgtgaccgcttctaccccaatgacttgtgggtggttgtgttccagtttcagcacatcatggttggccttatcctgcctggtattgtcatcctgtcctgctattgcattatcatctccaagctgtcacactccaagggccaccagaagcgcaaggccctcaagaccacagtcatcctcatcctggctttcttcgcctgttggctgccttactacattgggatcagcatcgactccttcatcctcctggaaatcatcaagcaagggtgtgagtttgagaacactgtgcacaagtggatttccatcaccgaggccctagctttcttccactgttgtctgaaccccatcctctatgctttccttggagccaaatttaaaacctctgcccagcacgcactcacctctgtgagcagagggtccagcctcaagatcctctccaaaggaaagcgaggtggacattcatctgtttccactgagtctgagtcttcaagttttcactccagctaa

SEQ ID NO: 18 - protein, 352 aa, Homo sapiens
MEGISIYTSDNYTEEMGSGDYDSMKEPCFREENANFNKIFLPTIYSIIFLTGIVGNGLVILVMGYQKKLRSMTDKYRLHLSVADLLFVITLPFWAVDAVANWYFGNFLCKAVHVIYTVNLYSSVLILAFISLDRYLAIVHATNSQRPRKLLAEKVVYVGVWIPALLLTIPDFIFANVSEADDRYICDRFYPNDLWVVVFQFQHIMVGLILPGIVILSCYCIIISKLSHSKGHQKRKALKTTVILILAFFACWLPYYIGISIDSFILLEIIKQGCEFENTVHKWISITEALAFFHCCLNPILYAFLGAKFKTSAQHALTSVSRGSSLKILSKGKRGGHSSVSTESESSSFHSS

SEQ ID NO: 19 - DNA, 1059 bp, Homo sapiens
  CDS (1)..(1059)
atggattatcaagtgtcaagtccaatctatgacatcaattattatacatcggagccctgccaaaaaatcaatgtgaagcaaatcgcagcccgcctcctgcctccgctctactcactggtgttcatctttggttttgtgggcaacatgctggtcatcctcatcctgataaactgcaaaaggctgaagagcatgactgacatctacctgctcaacctggccatctctgacctgtttttccttcttactgtccccttctgggctcactatgctgccgcccagtgggactttggaaatacaatgtgtcaactcttgacagggctctattttataggcttcttctctggaatcttcttcatcatcctcctgacaatcgataggtacctggctgtcgtccatgctgtgtttgctttaaaagccaggacggtcacctttggggtggtgacaagtgtgatcacttgggtggtggctgtgtttgcgtctctcccaggaatcatctttaccagatctcaaaaagaaggtcttcattacacctgcagctctcattttccatacagtcagtatcaattctggaagaatttccagacattaaagatagtcatcttggggctggtcctgccgctgcttgtcatggtcatctgctactcgggaatcctaaaaactctgcttcggtgtcgaaatgagaagaagaggcacagggctgtgaggcttatcttcaccatcatgattgtttattttctcttctgggctccctacaacattgtccttctcctgaacaccttccaggaattctttggcctgaataattgcagtagctctaacaggttggaccaagctatgcaggtgacagagactcttgggatgacgcactgctgcatcaaccccatcatctatgcctttgtcggggagaagttcagaaactacctcttagtcttcttccaaaagcacattgccaaacgcttctgcaaatgctgttctattttccagcaagaggctcccgagcgagcaagctcagtttacacccgatccactggggagcaggaaatatctgtgggcttgtga

SEQ ID NO: 20 - protein, 352 aa, Homo sapiens [sequence omitted]

SEQ ID NO: 21 - DNA, 2538 bp, Artificial Sequence
  hybrid sequence
  CDS (1)..(2538)
atgaataactcaacaaactcctctaacaatagcctggctcttacaagtccttataagacatttgaagtggtgtttattgtcctggtggctggatccctcagtttggtgaccattatcgggaacatcctagtcatggtttccattaaagtcaaccgccacctccagaccgtcaacaattactttttattcagcttggcctgtgctgaccttatcataggtgttttctccatgaacttgtacaccctctacactgtgattggttactggcctttgggacctgtggtgtgtgacctttggctagccctggactatgtggtcagcaatgcctcagttatgaatctgctcatcatcagctttgacaggtacttctgtgtcacaaaacctctgacctacccagtcaagcggaccacaaaaatggcaggtatgatgattgcagctgcctgggtcctctctttcatcctctgggctccagccattctcttctggcagttcattgtaggggtgagaactgtggaggatggggagtgctacattcagtttttttccaatgctgctgtcacctttggtacggctattgcagccttctatttgccagtgatcatcatgactgtgctatattggcacatatcccgagccagcaagagcaggataaagaaggacaagaaggagcctgttgccaaccaagaccccgtttctccaagtctggtacaaggaaggatagtgaagccaaacaataacaacatgcccagcagtgacgatggcctggagcacaacaaaatccagaatggcaaagcccccagggatcctgtgactgaaaactgtgttcagggagaggagaaggagagctccaatgactccacctcagtcagtgctgttgcctctaatatgagagatgatgaaataacccaggatgaaaacacagtttccacttccctgggccattccaaagatgagaactctaagcaaacatgcatcagaattggcaccaagaccccaaaaagtgactcatgtaccccaactaataccaccgtggaggtagtggggtcttcaggtcagaatggagatgaaaagcagaatattgtagcccgcaagattgtgaagatgactaagcagcctgcaaaaaagaagcctcctccttcccgggaaaagaaagtcaccaggacaatcttggctattctgttggctttcatcatcacttgggccccatacaatgtcatggtgctcattaacaccttttgtgcaccttgcatccccaacactgtgtggacaattggttactggctttgttacatcaacagcactatcaaccctgcctgctatgcactttgcaatgccaccttcaagaagacctttaaacaccttctcatgtgtcattataagaacataggcgctacaaggggaggtggaggtggaggcatgctgtcccgaaagggcattatccctgaggaatatgtgctgacccggctggcagaggaccctgcagagcccaggtaccgtactcgagagaggagggcccgcttcgtgtccaagaaaggcaactgcaacgtcgcccacaagaacattcgagagcagggccgcttcctgcaggatgtgttcaccacgctggtggacctcaaatggccacacactctgctcattttcaccatgtccttcctgtgcagctggctgctctttgccatggtctggtggctcatcgccttcgcccacggtgatctctatgcttacatggagaaaggcatcacggacctggccccctacccatacgatgtaccagattacgccggagagggcaccaatgtgccctgcgtcacaagcatccactccttttcatctgccttccttttctccatcgaggtccaggtgaccattggtttcggcgggcgcatggtgacagaggaatgtcccctggccatcctcattctcattgtgcagaatatcgtcgggctgatgatcaacgccatcatgctgggctgcatcttcatgaaaacggcccaggcacatcggcgggcagaaaccctcatcttcagcaagcatgctgtgatcaccctgcgccatggccgcctgtgcttcatgctgcgcgtaggggacctccgaaagagcatgatcattagcgccaccatccacatgcaggtggtgcgcaagaccaccagccccgagggcgaagttgtgcctctccaccaggtagacatccccatggagaatggcgtgggtggtaacggcatcttcctggtggccccactcatcatctaccacgtcatcgactccaacagcccgctctacgacctggctcctagtgacctgcaccaccaccaggacctggagatcattgtcatcttggaaggcgtggtagaaaccacgggcatcaccacccaggcccgcacctcctacctagctgacgagattctatgggggcagcgctttgtccccattgtggccgaggaggacggccgctattctgtggactactccaaatttggtaacaccattaaagtgcccacaccactctgcacagcccgccagcttgatgaggaccgcagt

SEQ ID NO: 22 - protein, 846 aa, Artificial Sequence
  Synthetic Construct
MNNSTNSSNNSLALTSPYKTFEVVFIVLVAGSLSLVTIIGNILVMVSIKVNRHLQTVNNYFLFSLACADLIIGVFSMNLYTLYTVIGYWPLGPVVCDLWLALDYVVSNASVMNLLIISFDRYFCVTKPLTYPVKRTTKMAGMMIAAAWVLSFILWAPAILFWQFIVGVRTVEDGECYIQFFSNAAVTFGTAIAAFYLPVIIMTVLYWHISRASKSRIKKDKKEPVANQDPVSPSLVQGRIVKPNNNNMPSSDDGLEHNKIQNGKAPRDPVTENCVQGEEKESSNDSTSVSAVASNMRDDEITQDENTVSTSLGHSKDENSKQTCIRIGTKTPKSDSCTPTNTTVEVVGSSGQNGDEKQNIVARKIVKMTKQPAKKKPPPSREKKVTRTILAILLAFIITWAPYNVMVLINTFCAPCIPNTVWTIGYWLCYINSTINPACYALCNATFKKTFKHLLMCHYKNIGATRGGGGGGMLSRKGIIPEEYVLTRLAEDPAEPRYRTRERRARFVSKKGNCNVAHKNIREQGRFLQDVFTTLVDLKWPHTLLIFTMSFLCSWLLFAMVWWLIAFAHGDLYAYMEKGITDLAPYPYDVPDYAGEGTNVPCVTSIHSFSSAFLFSIEVQVTIGFGGRMVTEECPLAILILIVQNIVGLMINAIMLGCIFMKTAQAHRRAETLIFSKHAVITLRHGRLCFMLRVGDLRKSMIISATIHMQVVRKTTSPEGEVVPLHQVDIPMENGVGGNGIFLVAPLIIYHVIDSNSPLYDLAPSDLHHHQDLEIIVILEGVVETTGITTQARTSYLADEILWGQRFVPIVAEEDGRYSVDYSKFGNTIKVPTPLCTARQLDEDRS

SEQ ID NO: 23 - DNA, 2646 bp, Artificial sequence
  hybrid sequence
  CDS (1)..(2646)
atgaataactcaacaaactcctctaacaatagcctggctcttacaagtccttataagacatttgaagtggtgtttattgtcctggtggctggatccctcagtttggtgaccattatcgggaacatcctagtcatggtttccattaaagtcaaccgccacctccagaccgtcaacaattactttttattcagcttggcctgtgctgaccttatcataggtgttttctccatgaacttgtacaccctctacactgtgattggttactggcctttgggacctgtggtgtgtgacctttggctagccctggactatgtggtcagcaatgcctcagttatgaatctgctcatcatcagctttgacaggtacttctgtgtcacaaaacctctgacctacccagtcaagcggaccacaaaaatggcaggtatgatgattgcagctgcctgggtcctctctttcatcctctgggctccagccattctcttctggcagttcattgtaggggtgagaactgtggaggatggggagtgctacattcagtttttttccaatgctgctgtcacctttggtacggctattgcagccttctatttgccagtgatcatcatgactgtgctatattggcacatatcccgagccagcaagagcaggataaagaaggacaagaaggagcctgttgccaaccaagaccccgtttctccaagtctggtacaaggaaggatagtgaagccaaacaataacaacatgcccagcagtgacgatggcctggagcacaacaaaatccagaatggcaaagcccccagggatcctgtgactgaaaactgtgttcagggagaggagaaggagagctccaatgactccacctcagtcagtgctgttgcctctaatatgagagatgatgaaataacccaggatgaaaacacagtttccacttccctgggccattccaaagatgagaactctaagcaaacatgcatcagaattggcaccaagaccccaaaaagtgactcatgtaccccaactaataccaccgtggaggtagtggggtcttcaggtcagaatggagatgaaaagcagaatattgtagcccgcaagattgtgaagatgactaagcagcctgcaaaaaagaagcctcctccttcccgggaaaagaaagtcaccaggacaatcttggctattctgttggctttcatcatcacttgggccccatacaatgtcatggtgctcattaacaccttttgtgcaccttgcatccccaacactgtgtggacaattggttactggctttgttacatcaacagcactatcaaccctgcctgctatgcactttgcaatgccaccttcaagaagacctttaaacaccttctcatgtgtcattataagaacataggcgctacaaggggaggtggaggtggaggcatgctgtcccgaaagggcattatccctgaggaatatgtgctgacccggctggcagaggaccctgcagagcccaggtaccgtactcgagagaggagggcccgcttcgtgtccaagaaaggcaactgcaacgtcgcccacaagaacattcgagagcagggccgcttcctgcaggatgtgttcaccacgctggtggacctcaaatggccacacactctgctcattttcaccatgtccttcctgtgcagctggctgctctttgccatggtctggtggctcatcgccttcgcccacggtgatctctatgcttacatggagaaaggcatcacggacctggccccctacccatacgatgtaccagattacgccggagagggcaccaatgtgccctgcgtcacaagcatccactccttttcatctgccttccttttctccatcgaggtccaggtgaccattggtttcggcgggcgcatggtgacagaggaatgtcccctggccatcctcattctcattgtgcagaatatcgtcgggctgatgatcaacgccatcatgctgggctgcatcttcatgaaaacggcccaggcacatcggcgggcagaaaccctcatcttcagcaagcatgctgtgatcaccctgcgccatggccgcctgtgcttcatgctgcgcgtaggggacctccgaaagagcatgatcattagcgccaccatccacatgcaggtggtgcgcaagaccaccagccccgagggcgaagttgtgcctctccaccaggtagacatccccatggagaatggcgtgggtggtaacggcatcttcctggtggccccactcatcatctaccacgtcatcgactccaacagcccgctctacgacctggctcctagtgacctgcaccaccaccaggacctggagatcattgtcatcttggaaggcgtggtagaaaccacgggcatcaccacccaggcccgcacctcctacctagctgacgagattctatgggggcagcgctttgtccccattgtggccgaggaggacggccgctattctgtggactactccaaatttggtaacaccattaaagtgcccacaccactctgcacagcccgccagcttgatgaggaccgcagtctgctggatgccctgaccctcgcctcgtcgcgggggcccctgcgcaagcgcagtgtggctgtggcgaaggccaagcccaagtttagcatctctccagattccttgtcc

SEQ ID NO: 24 - protein, 882 aa, Artificial sequence [sequence omitted]

SEQ ID NO: 25 - DNA, 2586 bp, Artificial sequence
  hybrid sequence
  CDS (1)..(2586)
atgaataactcaacaaactcctctaacaatagcctggctcttacaagtccttataagacatttgaagtggtgtttattgtcctggtggctggatccctcagtttggtgaccattatcgggaacatcctagtcatggtttccattaaagtcaaccgccacctccagaccgtcaacaattactttttattcagcttggcctgtgctgaccttatcataggtgttttctccatgaacttgtacaccctctacactgtgattggttactggcctttgggacctgtggtgtgtgacctttggctagccctggactatgtggtcagcaatgcctcagttatgaatctgctcatcatcagctttgacaggtacttctgtgtcacaaaacctctgacctacccagtcaagcggaccacaaaaatggcaggtatgatgattgcagctgcctgggtcctctctttcatcctctgggctccagccattctcttctggcagttcattgtaggggtgagaactgtggaggatggggagtgctacattcagtttttttccaatgctgctgtcacctttggtacggctattgcagccttctatttgccagtgatcatcatgactgtgctatattggcacatatcccgagccagcaagagcaggataaagaaggacaagaaggagcctgttgccaaccaagaccccgtttctccaagtctggtacaaggaaggatagtgaagccaaacaataacaacatgcccagcagtgacgatggcctggagcacaacaaaatccagaatggcaaagcccccagggatcctgtgactgaaaactgtgttcagggagaggagaaggagagctccaatgactccacctcagtcagtgctgttgcctctaatatgagagatgatgaaataacccaggatgaaaacacagtttccacttccctgggccattccaaagatgagaactctaagcaaacatgcatcagaattggcaccaagaccccaaaaagtgactcatgtaccccaactaataccaccgtggaggtagtggggtcttcaggtcagaatggagatgaaaagcagaatattgtagcccgcaagattgtgaagatgactaagcagcctgcaaaaaagaagcctcctccttcccgggaaaagaaagtcaccaggacaatcttggctattctgttggctttcatcatcacttgggccccatacaatgtcatggtgctcattaacaccttttgtgcaccttgcatccccaacactgtgtggacaattggttactggctttgttacatcaacagcactatcaaccctgcctgctatgcactttgcaatgccaccttcaagaagacctttaaacaccttctcatgtgtcattataagaacataggcgctacaaggggaggtggaggtggaggcatgctgtcccgaaagggcattatccctgaggaatatgtgctgacccggctggcagaggaccctgcagagcccaggtaccgtactcgagagaggagggcccgcttcgtgtccaagaaaggcaactgcaacgtcgcccacaagaacattcgagagcagggccgcttcctgcaggatgtgttcaccacgctggtggacctcaaatggccacacactctgctcattttcaccatgtccttcctgtgcagctggctgctctttgccatggtctggtggctcatcgccttcgcccacggtgacctggcccccggagagggcaccaatgtgccctgcgtcacaagcatccactccttttcatctgccttccttttctccatcgaggtccaggtgaccattggtttcggcgggcgcatggtgacagaggaatgtcccctggccatcctcattctcattgtgcagaatatcgtcgggctgatgatcaacgccatcatgctgggctgcatcttcatgaaaacggcccaggcacatcggcgggcagaaaccctcatcttcagcaagcatgctgtgatcaccctgcgccatggccgcctgtgcttcatgctgcgcgtaggggacctccgaaagagcatgatcattagcgccaccatccacatgcaggtggtgcgcaagaccaccagccccgagggcgaagttgtgcctctccaccaggtagacatccccatggagaatggcgtgggtggtaacggcatcttcctggtggccccactcatcatctaccacgtcatcgactccaacagcccgctctacgacctggctcctagtgacctgcaccaccaccaggacctggagatcattgtcatcttggaaggcgtggtagaaaccacgggcatcaccacccaggcccgcacctcctacctagctgacgagattctatgggggcagcgctttgtccccattgtggccgaggaggacggccgctattctgtggactactccaaatttggtaacaccattaaagtgcccacaccactctgcacagcccgccagcttgatgaggaccgcagtctgctggatgccctgaccctcgcctcgtcgcgggggcccctgcgcaagcgcagtgtggctgtggcgaaggccaagcccaagtttagcatctctccagattccttgtcc

SEQ ID NO: 26 - protein, 862 aa, Artificial sequence
  Synthetic Construct
MNNSTNSSNNSLALTSPYKTFEVVFIVLVAGSLSLVTIIGNILVMVSIKVNRHLQTVNNYFLFSLACADLIIGVFSMNLYTLYTVIGYWPLGPVVCDLWLALDYVVSNASVMNLLIISFDRYFCVTKPLTYPVKRTTKMAGMMIAAAWVLSFILWAPAILFWQFIVGVRTVEDGECYIQFFSNAAVTFGTAIAAFYLPVIIMTVLYWHISRASKSRIKKDKKEPVANQDPVSPSLVQGRIVKPNNNNMPSSDDGLEHNKIQNGKAPRDPVTENCVQGEEKESSNDSTSVSAVASNMRDDEITQDENTVSTSLGHSKDENSKQTCIRIGTKTPKSDSCTPTNTTVEVVGSSGQNGDEKQNIVARKIVKMTKQPAKKKPPPSREKKVTRTILAILLAFIITWAPYNVMVLINTFCAPCIPNTVWTIGYWLCYINSTINPACYALCNATFKKTFKHLLMCHYKNIGATRGGGGGGMLSRKGIIPEEYVLTRLAEDPAEPRYRTRERRARFVSKKGNCNVAHKNIREQGRFLQDVFTTLVDLKWPHTLLIFTMSFLCSWLLFAMVWWLIAFAHGDLAPGEGTNVPCVTSIHSFSSAFLFSIEVQVTIGFGGRMVTEECPLAILILIVQNIVGLMINAIMLGCIFMKTAQAHRRAETLIFSKHAVITLRHGRLCFMLRVGDLRKSMIISATIHMQVVRKTTSPEGEVVPLHQVDIPMENGVGGNGIFLVAPLIIYHVIDSNSPLYDLAPSDLHHHQDLEIIVILEGVVETTGITTQARTSYLADEILWGQRFVPIVAEEDGRYSVDYSKFGNTIKVPTPLCTARQLDEDRSLLDALTLASSRGPLRKRSVAVAKAKPKFSISPDSLS

SEQ ID NO: 27 - DNA, 2478 bp, Artificial sequence
  hybrid sequence
  CDS (1)..(2478)
atgaataactcaacaaactcctctaacaatagcctggctcttacaagtccttataagacatttgaagtggtgtttattgtcctggtggctggatccctcagtttggtgaccattatcgggaacatcctagtcatggtttccattaaagtcaaccgccacctccagaccgtcaacaattactttttattcagcttggcctgtgctgaccttatcataggtgttttctccatgaacttgtacaccctctacactgtgattggttactggcctttgggacctgtggtgtgtgacctttggctagccctggactatgtggtcagcaatgcctcagttatgaatctgctcatcatcagctttgacaggtacttctgtgtcacaaaacctctgacctacccagtcaagcggaccacaaaaatggcaggtatgatgattgcagctgcctgggtcctctctttcatcctctgggctccagccattctcttctggcagttcattgtaggggtgagaactgtggaggatggggagtgctacattcagtttttttccaatgctgctgtcacctttggtacggctattgcagccttctatttgccagtgatcatcatgactgtgctatattggcacatatcccgagccagcaagagcaggataaagaaggacaagaaggagcctgttgccaaccaagaccccgtttctccaagtctggtacaaggaaggatagtgaagccaaacaataacaacatgcccagcagtgacgatggcctggagcacaacaaaatccagaatggcaaagcccccagggatcctgtgactgaaaactgtgttcagggagaggagaaggagagctccaatgactccacctcagtcagtgctgttgcctctaatatgagagatgatgaaataacccaggatgaaaacacagtttccacttccctgggccattccaaagatgagaactctaagcaaacatgcatcagaattggcaccaagaccccaaaaagtgactcatgtaccccaactaataccaccgtggaggtagtggggtcttcaggtcagaatggagatgaaaagcagaatattgtagcccgcaagattgtgaagatgactaagcagcctgcaaaaaagaagcctcctccttcccgggaaaagaaagtcaccaggacaatcttggctattctgttggctttcatcatcacttgggccccatacaatgtcatggtgctcattaacaccttttgtgcaccttgcatccccaacactgtgtggacaattggttactggctttgttacatcaacagcactatcaaccctgcctgctatgcactttgcaatgccaccttcaagaagacctttaaacaccttctcatgtgtcattataagaacataggcgctacaaggggaggtggaggtggaggcatgctgtcccgaaagggcattatccctgaggaatatgtgctgacccggctggcagaggaccctgcagagcccaggtaccgtactcgagagaggagggcccgcttcgtgtccaagaaaggcaactgcaacgtcgcccacaagaacattcgagagcagggccgcttcctgcaggatgtgttcaccacgctggtggacctcaaatggccacacactctgctcattttcaccatgtccttcctgtgcagctggctgctctttgccatggtctggtggctcatcgccttcgcccacggtgacctggcccccggagagggcaccaatgtgccctgcgtcacaagcatccactccttttcatctgccttccttttctccatcgaggtccaggtgaccattggtttcggcgggcgcatggtgacagaggaatgtcccctggccatcctcattctcattgtgcagaatatcgtcgggctgatgatcaacgccatcatgctgggctgcatcttcatgaaaacggcccaggcacatcggcgggcagaaaccctcatcttcagcaagcatgctgtgatcaccctgcgccatggccgcctgtgcttcatgctgcgcgtaggggacctccgaaagagcatgatcattagcgccaccatccacatgcaggtggtgcgcaagaccaccagccccgagggcgaagttgtgcctctccaccaggtagacatccccatggagaatggcgtgggtggtaacggcatcttcctggtggccccactcatcatctaccacgtcatcgactccaacagcccgctctacgacctggctcctagtgacctgcaccaccaccaggacctggagatcattgtcatcttggaaggcgtggtagaaaccacgggcatcaccacccaggcccgcacctcctacctagctgacgagattctatgggggcagcgctttgtccccattgtggccgaggaggacggccgctattctgtggactactccaaatttggtaacaccattaaagtgcccacaccactctgcacagcccgccagcttgatgaggaccgcagt

SEQ ID NO: 28 - protein, 826 aa, Artificial sequence
  Synthetic Construct
MNNSTNSSNNSLALTSPYKTFEVVFIVLVAGSLSLVTIIGNILVMVSIKVNRHLQTVNNYFLFSLACADLIIGVFSMNLYTLYTVIGYWPLGPVVCDLWLALDYVVSNASVMNLLIISFDRYFCVTKPLTYPVKRTTKMAGMMIAAAWVLSFILWAPAILFWQFIVGVRTVEDGECYIQFFSNAAVTFGTAIAAFYLPVIIMTVLYWHISRASKSRIKKDKKEPVANQDPVSPSLVQGRIVKPNNNNMPSSDDGLEHNKIQNGKAPRDPVTENCVQGEEKESSNDSTSVSAVASNMRDDEITQDENTVSTSLGHSKDENSKQTCIRIGTKTPKSDSCTPTNTTVEVVGSSGQNGDEKQNIVARKIVKMTKQPAKKKPPPSREKKVTRTILAILLAFIITWAPYNVMVLINTFCAPCIPNTVWTIGYWLCYINSTINPACYALCNATFKKTFKHLLMCHYKNIGATRGGGGGGMLSRKGIIPEEYVLTRLAEDPAEPRYRTRERRARFVSKKGNCNVAHKNIREQGRFLQDVFTTLVDLKWPHTLLIFTMSFLCSWLLFAMVWWLIAFAHGDLAPGEGTNVPCVTSIHSFSSAFLFSIEVQVTIGFGGRMVTEECPLAILILIVQNIVGLMINAIMLGCIFMKTAQAHRRAETLIFSKHAVITLRHGRLCFMLRVGDLRKSMIISATIHMQVVRKTTSPEGEVVPLHQVDIPMENGVGGNGIFLVAPLIIYHVIDSNSPLYDLAPSDLHHHQDLEIIVILEGVVETTGITTQARTSYLADEILWGQRFVPIVAEEDGRYSVDYSKFGNTIKVPTPLCTARQLDEDRS

SEQ ID NO: 29 - DNA, 2460 bp, Artificial sequence
  hybrid sequence
  CDS (1)..(2460)
atgaataactcaacaaactcctctaacaatagcctggctcttacaagtccttataagacatttgaagtggtgtttattgtcctggtggctggatccctcagtttggtgaccattatcgggaacatcctagtcatggtttccattaaagtcaaccgccacctccagaccgtcaacaattactttttattcagcttggcctgtgctgaccttatcataggtgttttctccatgaacttgtacaccctctacactgtgattggttactggcctttgggacctgtggtgtgtgacctttggctagccctggactatgtggtcagcaatgcctcagttatgaatctgctcatcatcagctttgacaggtacttctgtgtcacaaaacctctgacctacccagtcaagcggaccacaaaaatggcaggtatgatgattgcagctgcctgggtcctctctttcatcctctgggctccagccattctcttctggcagttcattgtaggggtgagaactgtggaggatggggagtgctacattcagtttttttccaatgctgctgtcacctttggtacggctattgcagccttctatttgccagtgatcatcatgactgtgctatattggcacatatcccgagccagcaagagcaggataaagaaggacaagaaggagcctgttgccaaccaagaccccgtttctccaagtctggtacaaggaaggatagtgaagccaaacaataacaacatgcccagcagtgacgatggcctggagcacaacaaaatccagaatggcaaagcccccagggatcctgtgactgaaaactgtgttcagggagaggagaaggagagctccaatgactccacctcagtcagtgctgttgcctctaatatgagagatgatgaaataacccaggatgaaaacacagtttccacttccctgggccattccaaagatgagaactctaagcaaacatgcatcagaattggcaccaagaccccaaaaagtgactcatgtaccccaactaataccaccgtggaggtagtggggtcttcaggtcagaatggagatgaaaagcagaatattgtagcccgcaagattgtgaagatgactaagcagcctgcaaaaaagaagcctcctccttcccgggaaaagaaagtcaccaggacaatcttggctattctgttggctttcatcatcacttgggccccatacaatgtcatggtgctcattaacaccttttgtgcaccttgcatccccaacactgtgtggacaattggttactggctttgttacatcaacagcactatcaaccctgcctgctatgcactttgcaatgccaccttcaagaagacctttaaacaccttctcatgtgtcattataagaacataggcgctacaaggcctgcagagcccaggtaccgtactcgagagaggagggcccgcttcgtgtccaagaaaggcaactgcaacgtcgcccacaagaacattcgagagcagggccgcttcctgcaggatgtgttcaccacgctggtggacctcaaatggccacacactctgctcattttcaccatgtccttcctgtgcagctggctgctctttgccatggtctggtggctcatcgccttcgcccacggtgatctctatgcttacatggagaaaggcatcacggacctggccccctacccatacgatgtaccagattacgccggagagggcaccaatgtgccctgcgtcacaagcatccactccttttcatctgccttccttttctccatcgaggtccaggtgaccattggtttcggcgggcgcatggtgacagaggaatgtcccctggccatcctcattctcattgtgcagaatatcgtcgggctgatgatcaacgccatcatgctgggctgcatcttcatgaaaacggcccaggcacatcggcgggcagaaaccctcatcttcagcaagcatgctgtgatcaccctgcgccatggccgcctgtgcttcatgctgcgcgtaggggacctccgaaagagcatgatcattagcgccaccatccacatgcaggtggtgcgcaagaccaccagccccgagggcgaagttgtgcctctccaccaggtagacatccccatggagaatggcgtgggtggtaacggcatcttcctggtggccccactcatcatctaccacgtcatcgactccaacagcccgctctacgacctggctcctagtgacctgcaccaccaccaggacctggagatcattgtcatcttggaaggcgtggtagaaaccacgggcatcaccacccaggcccgcacctcctacctagctgacgagattctatgggggcagcgctttgtccccattgtggccgaggaggacggccgctattctgtggactactccaaatttggtaacaccattaaagtgcccacaccactctgcacagcccgccagcttgatgaggaccgcagt

SEQ ID NO: 30 - protein, 820 aa, Artificial sequence
  Synthetic Construct
MNNSTNSSNNSLALTSPYKTFEVVFIVLVAGSLSLVTIIGNILVMVSIKVNRHLQTVNNYFLFSLACADLIIGVFSMNLYTLYTVIGYWPLGPVVCDLWLALDYVVSNASVMNLLIISFDRYFCVTKPLTYPVKRTTKMAGMMIAAAWVLSFILWAPAILFWQFIVGVRTVEDGECYIQFFSNAAVTFGTAIAAFYLPVIIMTVLYWHISRASKSRIKKDKKEPVANQDPVSPSLVQGRIVKPNNNNMPSSDDGLEHNKIQNGKAPRDPVTENCVQGEEKESSNDSTSVSAVASNMRDDEITQDENTVSTSLGHSKDENSKQTCIRIGTKTPKSDSCTPTNTTVEVVGSSGQNGDEKQNIVARKIVKMTKQPAKKKPPPSREKKVTRTILAILLAFIITWAPYNVMVLINTFCAPCIPNTVWTIGYWLCYINSTINPACYALCNATFKKTFKHLLMCHYKNIGATRPAEPRYRTRERRARFVSKKGNCNVAHKNIREQGRFLQDVFTTLVDLKWPHTLLIFTMSFLCSWLLFAMVWWLIAFAHGDLYAYMEKGITDLAPYPYDVPDYAGEGTNVPCVTSIHSFSSAFLFSIEVQVTIGFGGRMVTEECPLAILILIVQNIVGLMINAIMLGCIFMKTAQAHRRAETLIFSKHAVITLRHGRLCFMLRVGDLRKSMIISATIHMQVVRKTTSPEGEVVPLHQVDIPMENGVGGNGIFLVAPLIIYHVIDSNSPLYDLAPSDLHHHQDLEIIVILEGVVETTGITTQARTSYLADEILWGQRFVPIVAEEDGRYSVDYSKFGNTIKVPTPLCTARQLDEDRS

SEQ ID NO: 31 - DNA, 2568 bp, Artificial sequence
  hybrid sequence
  CDS (1)..(2568)
atgaataactcaacaaactcctctaacaatagcctggctcttacaagtccttataagacatttgaagtggtgtttattgtcctggtggctggatccctcagtttggtgaccattatcgggaacatcctagtcatggtttccattaaagtcaaccgccacctccagaccgtcaacaattactttttattcagcttggcctgtgctgaccttatcataggtgttttctccatgaacttgtacaccctctacactgtgattggttactggcctttgggacctgtggtgtgtgacctttggctagccctggactatgtggtcagcaatgcctcagttatgaatctgctcatcatcagctttgacaggtacttctgtgtcacaaaacctctgacctacccagtcaagcggaccacaaaaatggcaggtatgatgattgcagctgcctgggtcctctctttcatcctctgggctccagccattctcttctggcagttcattgtaggggtgagaactgtggaggatggggagtgctacattcagtttttttccaatgctgctgtcacctttggtacggctattgcagccttctatttgccagtgatcatcatgactgtgctatattggcacatatcccgagccagcaagagcaggataaagaaggacaagaaggagcctgttgccaaccaagaccccgtttctccaagtctggtacaaggaaggatagtgaagccaaacaataacaacatgcccagcagtgacgatggcctggagcacaacaaaatccagaatggcaaagcccccagggatcctgtgactgaaaactgtgttcagggagaggagaaggagagctccaatgactccacctcagtcagtgctgttgcctctaatatgagagatgatgaaataacccaggatgaaaacacagtttccacttccctgggccattccaaagatgagaactctaagcaaacatgcatcagaattggcaccaagaccccaaaaagtgactcatgtaccccaactaataccaccgtggaggtagtggggtcttcaggtcagaatggagatgaaaagcagaatattgtagcccgcaagattgtgaagatgactaagcagcctgcaaaaaagaagcctcctccttcccgggaaaagaaagtcaccaggacaatcttggctattctgttggctttcatcatcacttgggccccatacaatgtcatggtgctcattaacaccttttgtgcaccttgcatccccaacactgtgtggacaattggttactggctttgttacatcaacagcactatcaaccctgcctgctatgcactttgcaatgccaccttcaagaagacctttaaacaccttctcatgtgtcattataagaacataggcgctacaaggcctgcagagcccaggtaccgtactcgagagaggagggcccgcttcgtgtccaagaaaggcaactgcaacgtcgcccacaagaacattcgagagcagggccgcttcctgcaggatgtgttcaccacgctggtggacctcaaatggccacacactctgctcattttcaccatgtccttcctgtgcagctggctgctctttgccatggtctggtggctcatcgccttcgcccacggtgatctctatgcttacatggagaaaggcatcacggacctggccccctacccatacgatgtaccagattacgccggagagggcaccaatgtgccctgcgtcacaagcatccactccttttcatctgccttccttttctccatcgaggtccaggtgaccattggtttcggcgggcgcatggtgacagaggaatgtcccctggccatcctcattctcattgtgcagaatatcgtcgggctgatgatcaacgccatcatgctgggctgcatcttcatgaaaacggcccaggcacatcggcgggcagaaaccctcatcttcagcaagcatgctgtgatcaccctgcgccatggccgcctgtgcttcatgctgcgcgtaggggacctccgaaagagcatgatcattagcgccaccatccacatgcaggtggtgcgcaagaccaccagccccgagggcgaagttgtgcctctccaccaggtagacatccccatggagaatggcgtgggtggtaacggcatcttcctggtggccccactcatcatctaccacgtcatcgactccaacagcccgctctacgacctggctcctagtgacctgcaccaccaccaggacctggagatcattgtcatcttggaaggcgtggtagaaaccacgggcatcaccacccaggcccgcacctcctacctagctgacgagattctatgggggcagcgctttgtccccattgtggccgaggaggacggccgctattctgtggactactccaaatttggtaacaccattaaagtgcccacaccactctgcacagcccgccagcttgatgaggaccgcagtctgctggatgccctgaccctcgcctcgtcgcgggggcccctgcgcaagcgcagtgtggctgtggcgaaggccaagcccaagtttagcatctctccagattccttgtcc

SEQ ID NO: 32 - protein, 856 aa, Artificial sequence
  Synthetic Construct
MNNSTNSSNNSLALTSPYKTFEVVFIVLVAGSLSLVTIIGNILVMVSIKVNRHLQTVNNYFLFSLACADLIIGVFSMNLYTLYTVIGYWPLGPVVCDLWLALDYVVSNASVMNLLIISFDRYFCVTKPLTYPVKRTTKMAGMMIAAAWVLSFILWAPAILFWQFIVGVRTVEDGECYIQFFSNAAVTFGTAIAAFYLPVIIMTVLYWHISRASKSRIKKDKKEPVANQDPVSPSLVQGRIVKPNNNNMPSSDDGLEHNKIQNGKAPRDPVTENCVQGEEKESSNDSTSVSAVASNMRDDEITQDENTVSTSLGHSKDENSKQTCIRIGTKTPKSDSCTPTNTTVEVVGSSGQNGDEKQNIVARKIVKMTKQPAKKKPPPSREKKVTRTILAILLAFIITWAPYNVMVLINTFCAPCIPNTVWTIGYWLCYINSTINPACYALCNATFKKTFKHLLMCHYKNIGATRPAEPRYRTRERRARFVSKKGNCNVAHKNIREQGRFLQDVFTTLVDLKWPHTLLIFTMSFLCSWLLFAMVWWLIAFAHGDLYAYMEKGITDLAPYPYDVPDYAGEGTNVPCVTSIHSFSSAFLFSIEVQVTIGFGGRMVTEECPLAILILIVQNIVGLMINAIMLGCIFMKTAQAHRRAETLIFSKHAVITLRHGRLCFMLRVGDLRKSMIISATIHMQVVRKTTSPEGEVVPLHQVDIPMENGVGGNGIFLVAPLIIYHVIDSNSPLYDLAPSDLHHHQDLEIIVILEGVVETTGITTQARTSYLADEILWGQRFVPIVAEEDGRYSVDYSKFGNTIKVPTPLCTARQLDEDRSLLDALTLASSRGPLRKRSVAVAKAKPKFSISPDSLS

SEQ ID NO: 33 - DNA, 2508 bp, Artificial sequence
  hybrid sequence
  CDS (1)..(2508)
atgaataactcaacaaactcctctaacaatagcctggctcttacaagtccttataagacatttgaagtggtgtttattgtcctggtggctggatccctcagtttggtgaccattatcgggaacatcctagtcatggtttccattaaagtcaaccgccacctccagaccgtcaacaattactttttattcagcttggcctgtgctgaccttatcataggtgttttctccatgaacttgtacaccctctacactgtgattggttactggcctttgggacctgtggtgtgtgacctttggctagccctggactatgtggtcagcaatgcctcagttatgaatctgctcatcatcagctttgacaggtacttctgtgtcacaaaacctctgacctacccagtcaagcggaccacaaaaatggcaggtatgatgattgcagctgcctgggtcctctctttcatcctctgggctccagccattctcttctggcagttcattgtaggggtgagaactgtggaggatggggagtgctacattcagtttttttccaatgctgctgtcacctttggtacggctattgcagccttctatttgccagtgatcatcatgactgtgctatattggcacatatcccgagccagcaagagcaggataaagaaggacaagaaggagcctgttgccaaccaagaccccgtttctccaagtctggtacaaggaaggatagtgaagccaaacaataacaacatgcccagcagtgacgatggcctggagcacaacaaaatccagaatggcaaagcccccagggatcctgtgactgaaaactgtgttcagggagaggagaaggagagctccaatgactccacctcagtcagtgctgttgcctctaatatgagagatgatgaaataacccaggatgaaaacacagtttccacttccctgggccattccaaagatgagaactctaagcaaacatgcatcagaattggcaccaagaccccaaaaagtgactcatgtaccccaactaataccaccgtggaggtagtggggtcttcaggtcagaatggagatgaaaagcagaatattgtagcccgcaagattgtgaagatgactaagcagcctgcaaaaaagaagcctcctccttcccgggaaaagaaagtcaccaggacaatcttggctattctgttggctttcatcatcacttgggccccatacaatgtcatggtgctcattaacaccttttgtgcaccttgcatccccaacactgtgtggacaattggttactggctttgttacatcaacagcactatcaaccctgcctgctatgcactttgcaatgccaccttcaagaagacctttaaacaccttctcatgtgtcattataagaacataggcgctacaaggcctgcagagcccaggtaccgtactcgagagaggagggcccgcttcgtgtccaagaaaggcaactgcaacgtcgcccacaagaacattcgagagcagggccgcttcctgcaggatgtgttcaccacgctggtggacctcaaatggccacacactctgctcattttcaccatgtccttcctgtgcagctggctgctctttgccatggtctggtggctcatcgccttcgcccacggtgacctggcccccggagagggcaccaatgtgccctgcgtcacaagcatccactccttttcatctgccttccttttctccatcgaggtccaggtgaccattggtttcggcgggcgcatggtgacagaggaatgtcccctggccatcctcattctcattgtgcagaatatcgtcgggctgatgatcaacgccatcatgctgggctgcatcttcatgaaaacggcccaggcacatcggcgggcagaaaccctcatcttcagcaagcatgctgtgatcaccctgcgccatggccgcctgtgcttcatgctgcgcgtaggggacctccgaaagagcatgatcattagcgccaccatccacatgcaggtggtgcgcaagaccaccagccccgagggcgaagttgtgcctctccaccaggtagacatccccatggagaatggcgtgggtggtaacggcatcttcctggtggccccactcatcatctaccacgtcatcgactccaacagcccgctctacgacctggctcctagtgacctgcaccaccaccaggacctggagatcattgtcatcttggaaggcgtggtagaaaccacgggcatcaccacccaggcccgcacctcctacctagctgacgagattctatgggggcagcgctttgtccccattgtggccgaggaggacggccgctattctgtggactactccaaatttggtaacaccattaaagtgcccacaccactctgcacagcccgccagcttgatgaggaccgcagtctgctggatgccctgaccctcgcctcgtcgcgggggcccctgcgcaagcgcagtgtggctgtggcgaaggccaagcccaagtttagcatctctccagattccttgtcc

SEQ ID NO: 34 - protein, 836 aa, Artificial sequence
  Synthetic Construct
MNNSTNSSNNSLALTSPYKTFEVVFIVLVAGSLSLVTIIGNILVMVSIKVNRHLQTVNNYFLFSLACADLIIGVFSMNLYTLYTVIGYWPLGPVVCDLWLALDYVVSNASVMNLLIISFDRYFCVTKPLTYPVKRTTKMAGMMIAAAWVLSFILWAPAILFWQFIVGVRTVEDGECYIQFFSNAAVTFGTAIAAFYLPVIIMTVLYWHISRASKSRIKKDKKEPVANQDPVSPSLVQGRIVKPNNNNMPSSDDGLEHNKIQNGKAPRDPVTENCVQGEEKESSNDSTSVSAVASNMRDDEITQDENTVSTSLGHSKDENSKQTCIRIGTKTPKSDSCTPTNTTVEVVGSSGQNGDEKQNIVARKIVKMTKQPAKKKPPPSREKKVTRTILAILLAFIITWAPYNVMVLINTFCAPCIPNTVWTIGYWLCYINSTINPACYALCNATFKKTFKHLLMCHYKNIGATRPAEPRYRTRERRARFVSKKGNCNVAHKNIREQGRFLQDVFTTLVDLKWPHTLLIFTMSFLCSWLLFAMVWWLIAFAHGDLAPGEGTNVPCVTSIHSFSSAFLFSIEVQVTIGFGGRMVTEECPLAILILIVQNIVGLMINAIMLGCIFMKTAQAHRRAETLIFSKHAVITLRHGRLCFMLRVGDLRKSMIISATIHMQVVRKTTSPEGEVVPLHQVDIPMENGVGGNGIFLVAPLIIYHVIDSNSPLYDLAPSDLHHHQDLEIIVILEGVVETTGITTQARTSYLADEILWGQRFVPIVAEEDGRYSVDYSKFGNTIKVPTPLCTARQLDEDRSLLDALTLASSRGPLRKRSVAVAKAKPKFSISPDSLS

SEQ ID NO: 35 - DNA, 2400 bp, Artificial sequence
  hybrid sequence
  CDS (1)..(2400)
atgaataactcaacaaactcctctaacaatagcctggctcttacaagtccttataagacatttgaagtggtgtttattgtcctggtggctggatccctcagtttggtgaccattatcgggaacatcctagtcatggtttccattaaagtcaaccgccacctccagaccgtcaacaattactttttattcagcttggcctgtgctgaccttatcataggtgttttctccatgaacttgtacaccctctacactgtgattggttactggcctttgggacctgtggtgtgtgacctttggctagccctggactatgtggtcagcaatgcctcagttatgaatctgctcatcatcagctttgacaggtacttctgtgtcacaaaacctctgacctacccagtcaagcggaccacaaaaatggcaggtatgatgattgcagctgcctgggtcctctctttcatcctctgggctccagccattctcttctggcagttcattgtaggggtgagaactgtggaggatggggagtgctacattcagtttttttccaatgctgctgtcacctttggtacggctattgcagccttctatttgccagtgatcatcatgactgtgctatattggcacatatcccgagccagcaagagcaggataaagaaggacaagaaggagcctgttgccaaccaagaccccgtttctccaagtctggtacaaggaaggatagtgaagccaaacaataacaacatgcccagcagtgacgatggcctggagcacaacaaaatccagaatggcaaagcccccagggatcctgtgactgaaaactgtgttcagggagaggagaaggagagctccaatgactccacctcagtcagtgctgttgcctctaatatgagagatgatgaaataacccaggatgaaaacacagtttccacttccctgggccattccaaagatgagaactctaagcaaacatgcatcagaattggcaccaagaccccaaaaagtgactcatgtaccccaactaataccaccgtggaggtagtggggtcttcaggtcagaatggagatgaaaagcagaatattgtagcccgcaagattgtgaagatgactaagcagcctgcaaaaaagaagcctcctccttcccgggaaaagaaagtcaccaggacaatcttggctattctgttggctttcatcatcacttgggccccatacaatgtcatggtgctcattaacaccttttgtgcaccttgcatccccaacactgtgtggacaattggttactggctttgttacatcaacagcactatcaaccctgcctgctatgcactttgcaatgccaccttcaagaagacctttaaacaccttctcatgtgtcattataagaacataggcgctacaaggcctgcagagcccaggtaccgtactcgagagaggagggcccgcttcgtgtccaagaaaggcaactgcaacgtcgcccacaagaacattcgagagcagggccgcttcctgcaggatgtgttcaccacgctggtggacctcaaatggccacacactctgctcattttcaccatgtccttcctgtgcagctggctgctctttgccatggtctggtggctcatcgccttcgcccacggtgacctggcccccggagagggcaccaatgtgccctgcgtcacaagcatccactccttttcatctgccttccttttctccatcgaggtccaggtgaccattggtttcggcgggcgcatggtgacagaggaatgtcccctggccatcctcattctcattgtgcagaatatcgtcgggctgatgatcaacgccatcatgctgggctgcatcttcatgaaaacggcccaggcacatcggcgggcagaaaccctcatcttcagcaagcatgctgtgatcaccctgcgccatggccgcctgtgcttcatgctgcgcgtaggggacctccgaaagagcatgatcattagcgccaccatccacatgcaggtggtgcgcaagaccaccagccccgagggcgaagttgtgcctctccaccaggtagacatccccatggagaatggcgtgggtggtaacggcatcttcctggtggccccactcatcatctaccacgtcatcgactccaacagcccgctctacgacctggctcctagtgacctgcaccaccaccaggacctggagatcattgtcatcttggaaggcgtggtagaaaccacgggcatcaccacccaggcccgcacctcctacctagctgacgagattctatgggggcagcgctttgtccccattgtggccgaggaggacggccgctattctgtggactactccaaatttggtaacaccattaaagtgcccacaccactctgcacagcccgccagcttgatgaggaccgcagt

SEQ ID NO: 36 - protein, 800 aa, Artificial sequence
  Synthetic Construct
MNNSTNSSNNSLALTSPYKTFEVVFIVLVAGSLSLVTIIGNILVMVSIKVNRHLQTVNNYFLFSLACADLIIGVFSMNLYTLYTVIGYWPLGPVVCDLWLALDYVVSNASVMNLLIISFDRYFCVTKPLTYPVKRTTKMAGMMIAAAWVLSFILWAPAILFWQFIVGVRTVEDGECYIQFFSNAAVTFGTAIAAFYLPVIIMTVLYWHISRASKSRIKKDKKEPVANQDPVSPSLVQGRIVKPNNNNMPSSDDGLEHNKIQNGKAPRDPVTENCVQGEEKESSNDSTSVSAVASNMRDDEITQDENTVSTSLGHSKDENSKQTCIRIGTKTPKSDSCTPTNTTVEVVGSSGQNGDEKQNIVARKIVKMTKQPAKKKPPPSREKKVTRTILAILLAFIITWAPYNVMVLINTFCAPCIPNTVWTIGYWLCYINSTINPACYALCNATFKKTFKHLLMCHYKNIGATRPAEPRYRTRERRARFVSKKGNCNVAHKNIREQGRFLQDVFTTLVDLKWPHTLLIFTMSFLCSWLLFAMVWWLIAFAHGDLAPGEGTNVPCVTSIHSFSSAFLFSIEVQVTIGFGGRMVTEECPLAILILIVQNIVGLMINAIMLGCIFMKTAQAHRRAETLIFSKHAVITLRHGRLCFMLRVGDLRKSMIISATIHMQVVRKTTSPEGEVVPLHQVDIPMENGVGGNGIFLVAPLIIYHVIDSNSPLYDLAPSDLHHHQDLEIIVILEGVVETTGITTQARTSYLADEILWGQRFVPIVAEEDGRYSVDYSKFGNTIKVPTPLCTARQLDEDRS

SEQ ID NO: 37 - DNA, 2445 bp, Artificial sequence
  hybrid sequence
  CDS (1)..(2445)
atgaataactcaacaaactcctctaacaatagcctggctcttacaagtccttataagacatttgaagtggtgtttattgtcctggtggctggatccctcagtttggtgaccattatcgggaacatcctagtcatggtttccattaaagtcaaccgccacctccagaccgtcaacaattactttttattcagcttggcctgtgctgaccttatcataggtgttttctccatgaacttgtacaccctctacactgtgattggttactggcctttgggacctgtggtgtgtgacctttggctagccctggactatgtggtcagcaatgcctcagttatgaatctgctcatcatcagctttgacaggtacttctgtgtcacaaaacctctgacctacccagtcaagcggaccacaaaaatggcaggtatgatgattgcagctgcctgggtcctctctttcatcctctgggctccagccattctcttctggcagttcattgtaggggtgagaactgtggaggatggggagtgctacattcagtttttttccaatgctgctgtcacctttggtacggctattgcagccttctatttgccagtgatcatcatgactgtgctatattggcacatatcccgagccagcaagagcaggataaagaaggacaagaaggagcctgttgccaaccaagaccccgtttctccaagtctggtacaaggaaggatagtgaagccaaacaataacaacatgcccagcagtgacgatggcctggagcacaacaaaatccagaatggcaaagcccccagggatcctgtgactgaaaactgtgttcagggagaggagaaggagagctccaatgactccacctcagtcagtgctgttgcctctaatatgagagatgatgaaataacccaggatgaaaacacagtttccacttccctgggccattccaaagatgagaactctaagcaaacatgcatcagaattggcaccaagaccccaaaaagtgactcatgtaccccaactaataccaccgtggaggtagtggggtcttcaggtcagaatggagatgaaaagcagaatattgtagcccgcaagattgtgaagatgactaagcagcctgcaaaaaagaagcctcctccttcccgggaaaagaaagtcaccaggacaatcttggctattctgttggctttcatcatcacttgggccccatacaatgtcatggtgctcattaacaccttttgtgcaccttgcatccccaacactgtgtggacaattggttactggctttgttacatcaacagcactatcaaccctgcctgctatgcactttgcaatgccaccttcaagaagacctttaaacaccttctcatgtgtcattataagaaccctgcagagcccaggtaccgtactcgagagaggagggcccgcttcgtgtccaagaaaggcaactgcaacgtcgcccacaagaacattcgagagcagggccgcttcctgcaggatgtgttcaccacgctggtggacctcaaatggccacacactctgctcattttcaccatgtccttcctgtgcagctggctgctctttgccatggtctggtggctcatcgccttcgcccacggtgatctctatgcttacatggagaaaggcatcacggacctggccccctacccatacgatgtaccagattacgccggagagggcaccaatgtgccctgcgtcacaagcatccactccttttcatctgccttccttttctccatcgaggtccaggtgaccattggtttcggcgggcgcatggtgacagaggaatgtcccctggccatcctcattctcattgtgcagaatatcgtcgggctgatgatcaacgccatcatgctgggctgcatcttcatgaaaacggcccaggcacatcggcgggcagaaaccctcatcttcagcaagcatgctgtgatcaccctgcgccatggccgcctgtgcttcatgctgcgcgtaggggacctccgaaagagcatgatcattagcgccaccatccacatgcaggtggtgcgcaagaccaccagccccgagggcgaagttgtgcctctccaccaggtagacatccccatggagaatggcgtgggtggtaacggcatcttcctggtggccccactcatcatctaccacgtcatcgactccaacagcccgctctacgacctggctcctagtgacctgcaccaccaccaggacctggagatcattgtcatcttggaaggcgtggtagaaaccacgggcatcaccacccaggcccgcacctcctacctagctgacgagattctatgggggcagcgctttgtccccattgtggccgaggaggacggccgctattctgtggactactccaaatttggtaacaccattaaagtgcccacaccactctgcacagcccgccagcttgatgaggaccgcagt

SEQ ID NO: 38 - protein, 815 aa, Artificial sequence
  Synthetic Construct
MNNSTNSSNNSLALTSPYKTFEVVFIVLVAGSLSLVTIIGNILVMVSIKVNRHLQTVNNYFLFSLACADLIIGVFSMNLYTLYTVIGYWPLGPVVCDLWLALDYVVSNASVMNLLIISFDRYFCVTKPLTYPVKRTTKMAGMMIAAAWVLSFILWAPAILFWQFIVGVRTVEDGECYIQFFSNAAVTFGTAIAAFYLPVIIMTVLYWHISRASKSRIKKDKKEPVANQDPVSPSLVQGRIVKPNNNNMPSSDDGLEHNKIQNGKAPRDPVTENCVQGEEKESSNDSTSVSAVASNMRDDEITQDENTVSTSLGHSKDENSKQTCIRIGTKTPKSDSCTPTNTTVEVVGSSGQNGDEKQNIVARKIVKMTKQPAKKKPPPSREKKVTRTILAILLAFIITWAPYNVMVLINTFCAPCIPNTVWTIGYWLCYINSTINPACYALCNATFKKTFKHLLMCHYKNPAEPRYRTRERRARFVSKKGNCNVAHKNIREQGRFLQDVFTTLVDLKWPHTLLIFTMSFLCSWLLFAMVWWLIAFAHGDLYAYMEKGITDLAPYPYDVPDYAGEGTNVPCVTSIHSFSSAFLFSIEVQVTIGFGGRMVTEECPLAILILIVQNIVGLMINAIMLGCIFMKTAQAHRRAETLIFSKHAVITLRHGRLCFMLRVGDLRKSMIISATIHMQVVRKTTSPEGEVVPLHQVDIPMENGVGGNGIFLVAPLIIYHVIDSNSPLYDLAPSDLHHHQDLEIIVILEGVVETTGITTQARTSYLADEILWGQRFVPIVAEEDGRYSVDYSKFGNTIKVPTPLCTARQLDEDRS

SEQ ID NO: 39 - DNA, 2553 bp, Artificial sequence
  hybrid sequence
  CDS (1)..(2553)
atgaataactcaacaaactcctctaacaatagcctggctcttacaagtccttataagacatttgaagtggtgtttattgtcctggtggctggatccctcagtttggtgaccattatcgggaacatcctagtcatggtttccattaaagtcaaccgccacctccagaccgtcaacaattactttttattcagcttggcctgtgctgaccttatcataggtgttttctccatgaacttgtacaccctctacactgtgattggttactggcctttgggacctgtggtgtgtgacctttggctagccctggactatgtggtcagcaatgcctcagttatgaatctgctcatcatcagctttgacaggtacttctgtgtcacaaaacctctgacctacccagtcaagcggaccacaaaaatggcaggtatgatgattgcagctgcctgggtcctctctttcatcctctgggctccagccattctcttctggcagttcattgtaggggtgagaactgtggaggatggggagtgctacattcagtttttttccaatgctgctgtcacctttggtacggctattgcagccttctatttgccagtgatcatcatgactgtgctatattggcacatatcccgagccagcaagagcaggataaagaaggacaagaaggagcctgttgccaaccaagaccccgtttctccaagtctggtacaaggaaggatagtgaagccaaacaataacaacatgcccagcagtgacgatggcctggagcacaacaaaatccagaatggcaaagcccccagggatcctgtgactgaaaactgtgttcagggagaggagaaggagagctccaatgactccacctcagtcagtgctgttgcctctaatatgagagatgatgaaataacccaggatgaaaacacagtttccacttccctgggccattccaaagatgagaactctaagcaaacatgcatcagaattggcaccaagaccccaaaaagtgactcatgtaccccaactaataccaccgtggaggtagtggggtcttcaggtcagaatggagatgaaaagcagaatattgtagcccgcaagattgtgaagatgactaagcagcctgcaaaaaagaagcctcctccttcccgggaaaagaaagtcaccaggacaatcttggctattctgttggctttcatcatcacttgggccccatacaatgtcatggtgctcattaacaccttttgtgcaccttgcatccccaacactgtgtggacaattggttactggctttgttacatcaacagcactatcaaccctgcctgctatgcactttgcaatgccaccttcaagaagacctttaaacaccttctcatgtgtcattataagaaccctgcagagcccaggtaccgtactcgagagaggagggcccgcttcgtgtccaagaaaggcaactgcaacgtcgcccacaagaacattcgagagcagggccgcttcctgcaggatgtgttcaccacgctggtggacctcaaatggccacacactctgctcattttcaccatgtccttcctgtgcagctggctgctctttgccatggtctggtggctcatcgccttcgcccacggtgatctctatgcttacatggagaaaggcatcacggacctggccccctacccatacgatgtaccagattacgccggagagggcaccaatgtgccctgcgtcacaagcatccactccttttcatctgccttccttttctccatcgaggtccaggtgaccattggtttcggcgggcgcatggtgacagaggaatgtcccctggccatcctcattctcattgtgcagaatatcgtcgggctgatgatcaacgccatcatgctgggctgcatcttcatgaaaacggcccaggcacatcggcgggcagaaaccctcatcttcagcaagcatgctgtgatcaccctgcgccatggccgcctgtgcttcatgctgcgcgtaggggacctccgaaagagcatgatcattagcgccaccatccacatgcaggtggtgcgcaagaccaccagccccgagggcgaagttgtgcctctccaccaggtagacatccccatggagaatggcgtgggtggtaacggcatcttcctggtggccccactcatcatctaccacgtcatcgactccaacagcccgctctacgacctggctcctagtgacctgcaccaccaccaggacctggagatcattgtcatcttggaaggcgtggtagaaaccacgggcatcaccacccaggcccgcacctcctacctagctgacgagattctatgggggcagcgctttgtccccattgtggccgaggaggacggccgctattctgtggactactccaaatttggtaacaccattaaagtgcccacaccactctgcacagcccgccagcttgatgaggaccgcagtctgctggatgccctgaccctcgcctcgtcgcgggggcccctgcgcaagcgcagtgtggctgtggcgaaggccaagcccaagtttagcatctctccagattccttgtcc

SEQ ID NO: 40 - protein, 851 aa, Artificial sequence
  Synthetic Construct
MNNSTNSSNNSLALTSPYKTFEVVFIVLVAGSLSLVTIIGNILVMVSIKVNRHLQTVNNYFLFSLACADLIIGVFSMNLYTLYTVIGYWPLGPVVCDLWLALDYVVSNASVMNLLIISFDRYFCVTKPLTYPVKRTTKMAGMMIAAAWVLSFILWAPAILFWQFIVGVRTVEDGECYIQFFSNAAVTFGTAIAAFYLPVIIMTVLYWHISRASKSRIKKDKKEPVANQDPVSPSLVQGRIVKPNNNNMPSSDDGLEHNKIQNGKAPRDPVTENCVQGEEKESSNDSTSVSAVASNMRDDEITQDENTVSTSLGHSKDENSKQTCIRIGTKTPKSDSCTPTNTTVEVVGSSGQNGDEKQNIVARKIVKMTKQPAKKKPPPSREKKVTRTILAILLAFIITWAPYNVMVLINTFCAPCIPNTVWTIGYWLCYINSTINPACYALCNATFKKTFKHLLMCHYKNPAEPRYRTRERRARFVSKKGNCNVAHKNIREQGRFLQDVFTTLVDLKWPHTLLIFTMSFLCSWLLFAMVWWLIAFAHGDLYAYMEKGITDLAPYPYDVPDYAGEGTNVPCVTSIHSFSSAFLFSIEVQVTIGFGGRMVTEECPLAILILIVQNIVGLMINAIMLGCIFMKTAQAHRRAETLIFSKHAVITLRHGRLCFMLRVGDLRKSMIISATIHMQVVRKTTSPEGEVVPLHQVDIPMENGVGGNGIFLVAPLIIYHVIDSNSPLYDLAPSDLHHHQDLEIIVILEGVVETTGITTQARTSYLADEILWGQRFVPIVAEEDGRYSVDYSKFGNTIKVPTPLCTARQLDEDRSLLDALTLASSRGPLRKRSVAVAKAKPKFSISPDSLS

SEQ ID NO: 41 - DNA, 2493 bp, Artificial sequence
  hybrid sequence
  CDS (1)..(2493)
atgaataactcaacaaactcctctaacaatagcctggctcttacaagtccttataagacatttgaagtggtgtttattgtcctggtggctggatccctcagtttggtgaccattatcgggaacatcctagtcatggtttccattaaagtcaaccgccacctccagaccgtcaacaattactttttattcagcttggcctgtgctgaccttatcataggtgttttctccatgaacttgtacaccctctacactgtgattggttactggcctttgggacctgtggtgtgtgacctttggctagccctggactatgtggtcagcaatgcctcagttatgaatctgctcatcatcagctttgacaggtacttctgtgtcacaaaacctctgacctacccagtcaagcggaccacaaaaatggcaggtatgatgattgcagctgcctgggtcctctctttcatcctctgggctccagccattctcttctggcagttcattgtaggggtgagaactgtggaggatggggagtgctacattcagtttttttccaatgctgctgtcacctttggtacggctattgcagccttctatttgccagtgatcatcatgactgtgctatattggcacatatcccgagccagcaagagcaggataaagaaggacaagaaggagcctgttgccaaccaagaccccgtttctccaagtctggtacaaggaaggatagtgaagccaaacaataacaacatgcccagcagtgacgatggcctggagcacaacaaaatccagaatggcaaagcccccagggatcctgtgactgaaaactgtgttcagggagaggagaaggagagctccaatgactccacctcagtcagtgctgttgcctctaatatgagagatgatgaaataacccaggatgaaaacacagtttccacttccctgggccattccaaagatgagaactctaagcaaacatgcatcagaattggcaccaagaccccaaaaagtgactcatgtaccccaactaataccaccgtggaggtagtggggtcttcaggtcagaatggagatgaaaagcagaatattgtagcccgcaagattgtgaagatgactaagcagcctgcaaaaaagaagcctcctccttcccgggaaaagaaagtcaccaggacaatcttggctattctgttggctttcatcatcacttgggccccatacaatgtcatggtgctcattaacaccttttgtgcaccttgcatccccaacactgtgtggacaattggttactggctttgttacatcaacagcactatcaaccctgcctgctatgcactttgcaatgccaccttcaagaagacctttaaacaccttctcatgtgtcattataagaaccctgcagagcccaggtaccgtactcgagagaggagggcccgcttcgtgtccaagaaaggcaactgcaacgtcgcccacaagaacattcgagagcagggccgcttcctgcaggatgtgttcaccacgctggtggacctcaaatggccacacactctgctcattttcaccatgtccttcctgtgcagctggctgctctttgccatggtctggtggctcatcgccttcgcccacggtgacctggcccccggagagggcaccaatgtgccctgcgtcacaagcatccactccttttcatctgccttccttttctccatcgaggtccaggtgaccattggtttcggcgggcgcatggtgacagaggaatgtcccctggccatcctcattctcattgtgcagaatatcgtcgggctgatgatcaacgccatcatgctgggctgcatcttcatgaaaacggcccaggcacatcggcgggcagaaaccctcatcttcagcaagcatgctgtgatcaccctgcgccatggccgcctgtgcttcatgctgcgcgtaggggacctccgaaagagcatgatcattagcgccaccatccacatgcaggtggtgcgcaagaccaccagccccgagggcgaagttgtgcctctccaccaggtagacatccccatggagaatggcgtgggtggtaacggcatcttcctggtggccccactcatcatctaccacgtcatcgactccaacagcccgctctacgacctggctcctagtgacctgcaccaccaccaggacctggagatcattgtcatcttggaaggcgtggtagaaaccacgggcatcaccacccaggcccgcacctcctacctagctgacgagattctatgggggcagcgctttgtccccattgtggccgaggaggacggccgctattctgtggactactccaaatttggtaacaccattaaagtgcccacaccactctgcacagcccgccagcttgatgaggaccgcagtctgctggatgccctgaccctcgcctcgtcgcgggggcccctgcgcaagcgcagtgtggctgtggcgaaggccaagcccaagtttagcatctctccagattccttgtcc

SEQ ID NO: 42 - protein, 831 aa, Artificial sequence
  Synthetic Construct
MNNSTNSSNNSLALTSPYKTFEVVFIVLVAGSLSLVTIIGNILVMVSIKVNRHLQTVNNYFLFSLACADLIIGVFSMNLYTLYTVIGYWPLGPVVCDLWLALDYVVSNASVMNLLIISFDRYFCVTKPLTYPVKRTTKMAGMMIAAAWVLSFILWAPAILFWQFIVGVRTVEDGECYIQFFSNAAVTFGTAIAAFYLPVIIMTVLYWHISRASKSRIKKDKKEPVANQDPVSPSLVQGRIVKPNNNNMPSSDDGLEHNKIQNGKAPRDPVTENCVQGEEKESSNDSTSVSAVASNMRDDEITQDENTVSTSLGHSKDENSKQTCIRIGTKTPKSDSCTPTNTTVEVVGSSGQNGDEKQNIVARKIVKMTKQPAKKKPPPSREKKVTRTILAILLAFIITWAPYNVMVLINTFCAPCIPNTVWTIGYWLCYINSTINPACYALCNATFKKTFKHLLMCHYKNPAEPRYRTRERRARFVSKKGNCNVAHKNIREQGRFLQDVFTTLVDLKWPHTLLIFTMSFLCSWLLFAMVWWLIAFAHGDLAPGEGTNVPCVTSIHSFSSAFLFSIEVQVTIGFGGRMVTEECPLAILILIVQNIVGLMINAIMLGCIFMKTAQAHRRAETLIFSKHAVITLRHGRLCFMLRVGDLRKSMIISATIHMQVVRKTTSPEGEVVPLHQVDIPMENGVGGNGIFLVAPLIIYHVIDSNSPLYDLAPSDLHHHQDLEIIVILEGVVETTGITTQARTSYLADEILWGQRFVPIVAEEDGRYSVDYSKFGNTIKVPTPLCTARQLDEDRSLLDALTLASSRGPLRKRSVAVAKAKPKFSISPDSLS

SEQ ID NO: 43 - DNA, 2385 bp, Artificial sequence
  hybrid sequence
  CDS (1)..(2385)
atgaataactcaacaaactcctctaacaatagcctggctcttacaagtccttataagacatttgaagtggtgtttattgtcctggtggctggatccctcagtttggtgaccattatcgggaacatcctagtcatggtttccattaaagtcaaccgccacctccagaccgtcaacaattactttttattcagcttggcctgtgctgaccttatcataggtgttttctccatgaacttgtacaccctctacactgtgattggttactggcctttgggacctgtggtgtgtgacctttggctagccctggactatgtggtcagcaatgcctcagttatgaatctgctcatcatcagctttgacaggtacttctgtgtcacaaaacctctgacctacccagtcaagcggaccacaaaaatggcaggtatgatgattgcagctgcctgggtcctctctttcatcctctgggctccagccattctcttctggcagttcattgtaggggtgagaactgtggaggatggggagtgctacattcagtttttttccaatgctgctgtcacctttggtacggctattgcagccttctatttgccagtgatcatcatgactgtgctatattggcacatatcccgagccagcaagagcaggataaagaaggacaagaaggagcctgttgccaaccaagaccccgtttctccaagtctggtacaaggaaggatagtgaagccaaacaataacaacatgcccagcagtgacgatggcctggagcacaacaaaatccagaatggcaaagcccccagggatcctgtgactgaaaactgtgttcagggagaggagaaggagagctccaatgactccacctcagtcagtgctgttgcctctaatatgagagatgatgaaataacccaggatgaaaacacagtttccacttccctgggccattccaaagatgagaactctaagcaaacatgcatcagaattggcaccaagaccccaaaaagtgactcatgtaccccaactaataccaccgtggaggtagtggggtcttcaggtcagaatggagatgaaaagcagaatattgtagcccgcaagattgtgaagatgactaagcagcctgcaaaaaagaagcctcctccttcccgggaaaagaaagtcaccaggacaatcttggctattctgttggctttcatcatcacttgggccccatacaatgtcatggtgctcattaacaccttttgtgcaccttgcatccccaacactgtgtggacaattggttactggctttgttacatcaacagcactatcaaccctgcctgctatgcactttgcaatgccaccttcaagaagacctttaaacaccttctcatgtgtcattataagaaccctgcagagcccaggtaccgtactcgagagaggagggcccgcttcgtgtccaagaaaggcaactgcaacgtcgcccacaagaacattcgagagcagggccgcttcctgcaggatgtgttcaccacgctggtggacctcaaatggccacacactctgctcattttcaccatgtccttcctgtgcagctggctgctctttgccatggtctggtggctcatcgccttcgcccacggtgacctggcccccggagagggcaccaatgtgccctgcgtcacaagcatccactccttttcatctgccttccttttctccatcgaggtccaggtgaccattggtttcggcgggcgcatggtgacagaggaatgtcccctggccatcctcattctcattgtgcagaatatcgtcgggctgatgatcaacgccatcatgctgggctgcatcttcatgaaaacggcccaggcacatcggcgggcagaaaccctcatcttcagcaagcatgctgtgatcaccctgcgccatggccgcctgtgcttcatgctgcgcgtaggggacctccgaaagagcatgatcattagcgccaccatccacatgcaggtggtgcgcaagaccaccagccccgagggcgaagttgtgcctctccaccaggtagacatccccatggagaatggcgtgggtggtaacggcatcttcctggtggccccactcatcatctaccacgtcatcgactccaacagcccgctctacgacctggctcctagtgacctgcaccaccaccaggacctggagatcattgtcatcttggaaggcgtggtagaaaccacgggcatcaccacccaggcccgcacctcctacctagctgacgagattctatgggggcagcgctttgtccccattgtggccgaggaggacggccgctattctgtggactactccaaatttggtaacaccattaaagtgcccacaccactctgcacagcccgccagcttgatgaggaccgcagt

SEQ ID NO: 44 - protein, 795 aa, Artificial sequence
  Synthetic Construct
MNNSTNSSNNSLALTSPYKTFEVVFIVLVAGSLSLVTIIGNILVMVSIKVNRHLQTVNNYFLFSLACADLIIGVFSMNLYTLYTVIGYWPLGPVVCDLWLALDYVVSNASVMNLLIISFDRYFCVTKPLTYPVKRTTKMAGMMIAAAWVLSFILWAPAILFWQFIVGVRTVEDGECYIQFFSNAAVTFGTAIAAFYLPVIIMTVLYWHISRASKSRIKKDKKEPVANQDPVSPSLVQGRIVKPNNNNMPSSDDGLEHNKIQNGKAPRDPVTENCVQGEEKESSNDSTSVSAVASNMRDDEITQDENTVSTSLGHSKDENSKQTCIRIGTKTPKSDSCTPTNTTVEVVGSSGQNGDEKQNIVARKIVKMTKQPAKKKPPPSREKKVTRTILAILLAFIITWAPYNVMVLINTFCAPCIPNTVWTIGYWLCYINSTINPACYALCNATFKKTFKHLLMCHYKNPAEPRYRTRERRARFVSKKGNCNVAHKNIREQGRFLQDVFTTLVDLKWPHTLLIFTMSFLCSWLLFAMVWWLIAFAHGDLAPGEGTNVPCVTSIHSFSSAFLFSIEVQVTIGFGGRMVTEECPLAILILIVQNIVGLMINAIMLGCIFMKTAQAHRRAETLIFSKHAVITLRHGRLCFMLRVGDLRKSMIISATIHMQVVRKTTSPEGEVVPLHQVDIPMENGVGGNGIFLVAPLIIYHVIDSNSPLYDLAPSDLHHHQDLEIIVILEGVVETTGITTQARTSYLADEILWGQRFVPIVAEEDGRYSVDYSKFGNTIKVPTPLCTARQLDEDRS

SEQ ID NO: 45 - DNA, 2445 bp, Artificial sequence
  hybrid sequence
  CDS (1)..(2445)
atgaataactcaacaaactcctctaacaatagcctggctcttacaagtccttataagacatttgaagtggtgtttattgtcctggtggctggatccctcagtttggtgaccattatcgggaacatcctagtcatggtttccattaaagtcaaccgccacctccagaccgtcaacaattactttttattcagcttggcctgtgctgaccttatcataggtgttttctccatgaacttgtacaccctctacactgtgattggttactggcctttgggacctgtggtgtgtgacctttggctagccctggactatgtggtcagcaatgcctcagttatgaatctgctcatcatcagctttgacaggtacttctgtgtcacaaaacctctgacctacccagtcaagcggaccacaaaaatggcaggtatgatgattgcagctgcctgggtcctctctttcatcctctgggctccagccattctcttctggcagttcattgtaggggtgagaactgtggaggatggggagtgctacattcagtttttttccaatgctgctgtcacctttggtacggctattgcagccttctatttgccagtgatcatcatgactgtgctatattggcacatatcccgagccagcaagagcaggataaagaaggacaagaaggagcctgttgccaaccaagaccccgtttctccaagtctggtacaaggaaggatagtgaagccaaacaataacaacatgcccagcagtgacgatggcctggagcacaacaaaatccagaatggcaaagcccccagggatcctgtgactgaaaactgtgttcagggagaggagaaggagagctccaatgactccacctcagtcagtgctgttgcctctaatatgagagatgatgaaataacccaggatgaaaacacagtttccacttccctgggccattccaaagatgagaactctaagcaaacatgcatcagaattggcaccaagaccccaaaaagtgactcatgtaccccaactaataccaccgtggaggtagtggggtcttcaggtcagaatggagatgaaaagcagaatattgtagcccgcaagattgtgaagatgactaagcagcctgcaaaaaagaagcctcctccttcccgggaaaagaaagtcaccaggacaatcttggctattctgttggctttcatcatcacttgggccccatacaatgtcatggtgctcattaacaccttttgtgcaccttgcatccccaacactgtgtggacaattggttactggctttgttacatcaacagcactatcaaccctgcctgctatgcactttgcaatgccaccttcaagaagacctttaaacaccttctcatgtgtcattataagaacataggcgctacaaggtaccgtactcgagagaggagggcccgcttcgtgtccaagaaaggcaactgcaacgtcgcccacaagaacattcgagagcagggccgcttcctgcaggatgtgttcaccacgctggtggacctcaaatggccacacactctgctcattttcaccatgtccttcctgtgcagctggctgctctttgccatggtctggtggctcatcgccttcgcccacggtgatctctatgcttacatggagaaaggcatcacggacctggccccctacccatacgatgtaccagattacgccggagagggcaccaatgtgccctgcgtcacaagcatccactccttttcatctgccttccttttctccatcgaggtccaggtgaccattggtttcggcgggcgcatggtgacagaggaatgtcccctggccatcctcattctcattgtgcagaatatcgtcgggctgatgatcaacgccatcatgctgggctgcatcttcatgaaaacggcccaggcacatcggcgggcagaaaccctcatcttcagcaagcatgctgtgatcaccctgcgccatggccgcctgtgcttcatgctgcgcgtaggggacctccgaaagagcatgatcattagcgccaccatccacatgcaggtggtgcgcaagaccaccagccccgagggcgaagttgtgcctctccaccaggtagacatccccatggagaatggcgtgggtggtaacggcatcttcctggtggccccactcatcatctaccacgtcatcgactccaacagcccgctctacgacctggctcctagtgacctgcaccaccaccaggacctggagatcattgtcatcttggaaggcgtggtagaaaccacgggcatcaccacccaggcccgcacctcctacctagctgacgagattctatgggggcagcgctttgtccccattgtggccgaggaggacggccgctattctgtggactactccaaatttggtaacaccattaaagtgcccacaccactctgcacagcccgccagcttgatgaggaccgcagt

SEQ ID NO: 46 - protein, 815 aa, Artificial sequence
  Synthetic Construct
MNNSTNSSNNSLALTSPYKTFEVVFIVLVAGSLSLVTIIGNILVMVSIKVNRHLQTVNNYFLFSLACADLIIGVFSMNLYTLYTVIGYWPLGPVVCDLWLALDYVVSNASVMNLLIISFDRYFCVTKPLTYPVKRTTKMAGMMIAAAWVLSFILWAPAILFWQFIVGVRTVEDGECYIQFFSNAAVTFGTAIAAFYLPVIIMTVLYWHISRASKSRIKKDKKEPVANQDPVSPSLVQGRIVKPNNNNMPSSDDGLEHNKIQNGKAPRDPVTENCVQGEEKESSNDSTSVSAVASNMRDDEITQDENTVSTSLGHSKDENSKQTCIRIGTKTPKSDSCTPTNTTVEVVGSSGQNGDEKQNIVARKIVKMTKQPAKKKPPPSREKKVTRTILAILLAFIITWAPYNVMVLINTFCAPCIPNTVWTIGYWLCYINSTINPACYALCNATFKKTFKHLLMCHYKNIGATRYRTRERRARFVSKKGNCNVAHKNIREQGRFLQDVFTTLVDLKWPHTLLIFTMSFLCSWLLFAMVWWLIAFAHGDLYAYMEKGITDLAPYPYDVPDYAGEGTNVPCVTSIHSFSSAFLFSIEVQVTIGFGGRMVTEECPLAILILIVQNIVGLMINAIMLGCIFMKTAQAHRRAETLIFSKHAVITLRHGRLCFMLRVGDLRKSMIISATIHMQVVRKTTSPEGEVVPLHQVDIPMENGVGGNGIFLVAPLIIYHVIDSNSPLYDLAPSDLHHHQDLEIIVILEGVVETTGITTQARTSYLADEILWGQRFVPIVAEEDGRYSVDYSKFGNTIKVPTPLCTARQLDEDRS

SEQ ID NO: 47 - DNA, 2553 bp, Artificial sequence
  hybrid sequence
  CDS (1)..(2553)
atgaataactcaacaaactcctctaacaatagcctggctcttacaagtccttataagacatttgaagtggtgtttattgtcctggtggctggatccctcagtttggtgaccattatcgggaacatcctagtcatggtttccattaaagtcaaccgccacctccagaccgtcaacaattactttttattcagcttggcctgtgctgaccttatcataggtgttttctccatgaacttgtacaccctctacactgtgattggttactggcctttgggacctgtggtgtgtgacctttggctagccctggactatgtggtcagcaatgcctcagttatgaatctgctcatcatcagctttgacaggtacttctgtgtcacaaaacctctgacctacccagtcaagcggaccacaaaaatggcaggtatgatgattgcagctgcctgggtcctctctttcatcctctgggctccagccattctcttctggcagttcattgtaggggtgagaactgtggaggatggggagtgctacattcagtttttttccaatgctgctgtcacctttggtacggctattgcagccttctatttgccagtgatcatcatgactgtgctatattggcacatatcccgagccagcaagagcaggataaagaaggacaagaaggagcctgttgccaaccaagaccccgtttctccaagtctggtacaaggaaggatagtgaagccaaacaataacaacatgcccagcagtgacgatggcctggagcacaacaaaatccagaatggcaaagcccccagggatcctgtgactgaaaactgtgttcagggagaggagaaggagagctccaatgactccacctcagtcagtgctgttgcctctaatatgagagatgatgaaataacccaggatgaaaacacagtttccacttccctgggccattccaaagatgagaactctaagcaaacatgcatcagaattggcaccaagaccccaaaaagtgactcatgtaccccaactaataccaccgtggaggtagtggggtcttcaggtcagaatggagatgaaaagcagaatattgtagcccgcaagattgtgaagatgactaagcagcctgcaaaaaagaagcctcctccttcccgggaaaagaaagtcaccaggacaatcttggctattctgttggctttcatcatcacttgggccccatacaatgtcatggtgctcattaacaccttttgtgcaccttgcatccccaacactgtgtggacaattggttactggctttgttacatcaacagcactatcaaccctgcctgctatgcactttgcaatgccaccttcaagaagacctttaaacaccttctcatgtgtcattataagaacataggcgctacaaggtaccgtactcgagagaggagggcccgcttcgtgtccaagaaaggcaactgcaacgtcgcccacaagaacattcgagagcagggccgcttcctgcaggatgtgttcaccacgctggtggacctcaaatggccacacactctgctcattttcaccatgtccttcctgtgcagctggctgctctttgccatggtctggtggctcatcgccttcgcccacggtgatctctatgcttacatggagaaaggcatcacggacctggccccctacccatacgatgtaccagattacgccggagagggcaccaatgtgccctgcgtcacaagcatccactccttttcatctgccttccttttctccatcgaggtccaggtgaccattggtttcggcgggcgcatggtgacagaggaatgtcccctggccatcctcattctcattgtgcagaatatcgtcgggctgatgatcaacgccatcatgctgggctgcatcttcatgaaaacggcccaggcacatcggcgggcagaaaccctcatcttcagcaagcatgctgtgatcaccctgcgccatggccgcctgtgcttcatgctgcgcgtaggggacctccgaaagagcatgatcattagcgccaccatccacatgcaggtggtgcgcaagaccaccagccccgagggcgaagttgtgcctctccaccaggtagacatccccatggagaatggcgtgggtggtaacggcatcttcctggtggccccactcatcatctaccacgtcatcgactccaacagcccgctctacgacctggctcctagtgacctgcaccaccaccaggacctggagatcattgtcatcttggaaggcgtggtagaaaccacgggcatcaccacccaggcccgcacctcctacctagctgacgagattctatgggggcagcgctttgtccccattgtggccgaggaggacggccgctattctgtggactactccaaatttggtaacaccattaaagtgcccacaccactctgcacagcccgccagcttgatgaggaccgcagtctgctggatgccctgaccctcgcctcgtcgcgggggcccctgcgcaagcgcagtgtggctgtggcgaaggccaagcccaagtttagcatctctccagattccttgtcc

SEQ ID NO: 48 - protein, 851 aa, Artificial sequence
  Synthetic Construct
MNNSTNSSNNSLALTSPYKTFEVVFIVLVAGSLSLVTIIGNILVMVSIKVNRHLQTVNNYFLFSLACADLIIGVFSMNLYTLYTVIGYWPLGPVVCDLWLALDYVVSNASVMNLLIISFDRYFCVTKPLTYPVKRTTKMAGMMIAAAWVLSFILWAPAILFWQFIVGVRTVEDGECYIQFFSNAAVTFGTAIAAFYLPVIIMTVLYWHISRASKSRIKKDKKEPVANQDPVSPSLVQGRIVKPNNNNMPSSDDGLEHNKIQNGKAPRDPVTENCVQGEEKESSNDSTSVSAVASNMRDDEITQDENTVSTSLGHSKDENSKQTCIRIGTKTPKSDSCTPTNTTVEVVGSSGQNGDEKQNIVARKIVKMTKQPAKKKPPPSREKKVTRTILAILLAFIITWAPYNVMVLINTFCAPCIPNTVWTIGYWLCYINSTINPACYALCNATFKKTFKHLLMCHYKNIGATRYRTRERRARFVSKKGNCNVAHKNIREQGRFLQDVFTTLVDLKWPHTLLIFTMSFLCSWLLFAMVWWLIAFAHGDLYAYMEKGITDLAPYPYDVPDYAGEGTNVPCVTSIHSFSSAFLFSIEVQVTIGFGGRMVTEECPLAILILIVQNIVGLMINAIMLGCIFMKTAQAHRRAETLIFSKHAVITLRHGRLCFMLRVGDLRKSMIISATIHMQVVRKTTSPEGEVVPLHQVDIPMENGVGGNGIFLVAPLIIYHVIDSNSPLYDLAPSDLHHHQDLEIIVILEGVVETTGITTQARTSYLADEILWGQRFVPIVAEEDGRYSVDYSKFGNTIKVPTPLCTARQLDEDRSLLDALTLASSRGPLRKRSVAVAKAKPKFSISPDSLS

SEQ ID NO: 49 - DNA, 2493 bp, Artificial sequence
  hybrid sequence
  CDS (1)..(2493)
atgaataactcaacaaactcctctaacaatagcctggctcttacaagtccttataagacatttgaagtggtgtttattgtcctggtggctggatccctcagtttggtgaccattatcgggaacatcctagtcatggtttccattaaagtcaaccgccacctccagaccgtcaacaattactttttattcagcttggcctgtgctgaccttatcataggtgttttctccatgaacttgtacaccctctacactgtgattggttactggcctttgggacctgtggtgtgtgacctttggctagccctggactatgtggtcagcaatgcctcagttatgaatctgctcatcatcagctttgacaggtacttctgtgtcacaaaacctctgacctacccagtcaagcggaccacaaaaatggcaggtatgatgattgcagctgcctgggtcctctctttcatcctctgggctccagccattctcttctggcagttcattgtaggggtgagaactgtggaggatggggagtgctacattcagtttttttccaatgctgctgtcacctttggtacggctattgcagccttctatttgccagtgatcatcatgactgtgctatattggcacatatcccgagccagcaagagcaggataaagaaggacaagaaggagcctgttgccaaccaagaccccgtttctccaagtctggtacaaggaaggatagtgaagccaaacaataacaacatgcccagcagtgacgatggcctggagcacaacaaaatccagaatggcaaagcccccagggatcctgtgactgaaaactgtgttcagggagaggagaaggagagctccaatgactccacctcagtcagtgctgttgcctctaatatgagagatgatgaaataacccaggatgaaaacacagtttccacttccctgggccattccaaagatgagaactctaagcaaacatgcatcagaattggcaccaagaccccaaaaagtgactcatgtaccccaactaataccaccgtggaggtagtggggtcttcaggtcagaatggagatgaaaagcagaatattgtagcccgcaagattgtgaagatgactaagcagcctgcaaaaaagaagcctcctccttcccgggaaaagaaagtcaccaggacaatcttggctattctgttggctttcatcatcacttgggccccatacaatgtcatggtgctcattaacaccttttgtgcaccttgcatccccaacactgtgtggacaattggttactggctttgttacatcaacagcactatcaaccctgcctgctatgcactttgcaatgccaccttcaagaagacctttaaacaccttctcatgtgtcattataagaacataggcgctacaaggtaccgtactcgagagaggagggcccgcttcgtgtccaagaaaggcaactgcaacgtcgcccacaagaacattcgagagcagggccgcttcctgcaggatgtgttcaccacgctggtggacctcaaatggccacacactctgctcattttcaccatgtccttcctgtgcagctggctgctctttgccatggtctggtggctcatcgccttcgcccacggtgacctggcccccggagagggcaccaatgtgccctgcgtcacaagcatccactccttttcatctgccttccttttctccatcgaggtccaggtgaccattggtttcggcgggcgcatggtgacagaggaatgtcccctggccatcctcattctcattgtgcagaatatcgtcgggctgatgatcaacgccatcatgctgggctgcatcttcatgaaaacggcccaggcacatcggcgggcagaaaccctcatcttcagcaagcatgctgtgatcaccctgcgccatggccgcctgtgcttcatgctgcgcgtaggggacctccgaaagagcatgatcattagcgccaccatccacatgcaggtggtgcgcaagaccaccagccccgagggcgaagttgtgcctctccaccaggtagacatccccatggagaatggcgtgggtggtaacggcatcttcctggtggccccactcatcatctaccacgtcatcgactccaacagcccgctctacgacctggctcctagtgacctgcaccaccaccaggacctggagatcattgtcatcttggaaggcgtggtagaaaccacgggcatcaccacccaggcccgcacctcctacctagctgacgagattctatgggggcagcgctttgtccccattgtggccgaggaggacggccgctattctgtggactactccaaatttggtaacaccattaaagtgcccacaccactctgcacagcccgccagcttgatgaggaccgcagtctgctggatgccctgaccctcgcctcgtcgcgggggcccctgcgcaagcgcagtgtggctgtggcgaaggccaagcccaagtttagcatctctccagattccttgtcc

SEQ ID NO: 50 - protein, 831 aa, Artificial sequence
  Synthetic Construct
MNNSTNSSNNSLALTSPYKTFEVVFIVLVAGSLSLVTIIGNILVMVSIKVNRHLQTVNNYFLFSLACADLIIGVFSMNLYTLYTVIGYWPLGPVVCDLWLALDYVVSNASVMNLLIISFDRYFCVTKPLTYPVKRTTKMAGMMIAAAWVLSFILWAPAILFWQFIVGVRTVEDGECYIQFFSNAAVTFGTAIAAFYLPVIIMTVLYWHISRASKSRIKKDKKEPVANQDPVSPSLVQGRIVKPNNNNMPSSDDGLEHNKIQNGKAPRDPVTENCVQGEEKESSNDSTSVSAVASNMRDDEITQDENTVSTSLGHSKDENSKQTCIRIGTKTPKSDSCTPTNTTVEVVGSSGQNGDEKQNIVARKIVKMTKQPAKKKPPPSREKKVTRTILAILLAFIITWAPYNVMVLINTFCAPCIPNTVWTIGYWLCYINSTINPACYALCNATFKKTFKHLLMCHYKNIGATRYRTRERRARFVSKKGNCNVAHKNIREQGRFLQDVFTTLVDLKWPHTLLIFTMSFLCSWLLFAMVWWLIAFAHGDLAPGEGTNVPCVTSIHSFSSAFLFSIEVQVTIGFGGRMVTEECPLAILILIVQNIVGLMINAIMLGCIFMKTAQAHRRAETLIFSKHAVITLRHGRLCFMLRVGDLRKSMIISATIHMQVVRKTTSPEGEVVPLHQVDIPMENGVGGNGIFLVAPLIIYHVIDSNSPLYDLAPSDLHHHQDLEIIVILEGVVETTGITTQARTSYLADEILWGQRFVPIVAEEDGRYSVDYSKFGNTIKVPTPLCTARQLDEDRSLLDALTLASSRGPLRKRSVAVAKAKPKFSISPDSLS

SEQ ID NO: 51 - DNA, 2385 bp, Artificial sequence
  hybrid sequence
  CDS (1)..(2385)
atgaataactcaacaaactcctctaacaatagcctggctcttacaagtccttataagacatttgaagtggtgtttattgtcctggtggctggatccctcagtttggtgaccattatcgggaacatcctagtcatggtttccattaaagtcaaccgccacctccagaccgtcaacaattactttttattcagcttggcctgtgctgaccttatcataggtgttttctccatgaacttgtacaccctctacactgtgattggttactggcctttgggacctgtggtgtgtgacctttggctagccctggactatgtggtcagcaatgcctcagttatgaatctgctcatcatcagctttgacaggtacttctgtgtcacaaaacctctgacctacccagtcaagcggaccacaaaaatggcaggtatgatgattgcagctgcctgggtcctctctttcatcctctgggctccagccattctcttctggcagttcattgtaggggtgagaactgtggaggatggggagtgctacattcagtttttttccaatgctgctgtcacctttggtacggctattgcagccttctatttgccagtgatcatcatgactgtgctatattggcacatatcccgagccagcaagagcaggataaagaaggacaagaaggagcctgttgccaaccaagaccccgtttctccaagtctggtacaaggaaggatagtgaagccaaacaataacaacatgcccagcagtgacgatggcctggagcacaacaaaatccagaatggcaaagcccccagggatcctgtgactgaaaactgtgttcagggagaggagaaggagagctccaatgactccacctcagtcagtgctgttgcctctaatatgagagatgatgaaataacccaggatgaaaacacagtttccacttccctgggccattccaaagatgagaactctaagcaaacatgcatcagaattggcaccaagaccccaaaaagtgactcatgtaccccaactaataccaccgtggaggtagtggggtcttcaggtcagaatggagatgaaaagcagaatattgtagcccgcaagattgtgaagatgactaagcagcctgcaaaaaagaagcctcctccttcccgggaaaagaaagtcaccaggacaatcttggctattctgttggctttcatcatcacttgggccccatacaatgtcatggtgctcattaacaccttttgtgcaccttgcatccccaacactgtgtggacaattggttactggctttgttacatcaacagcactatcaaccctgcctgctatgcactttgcaatgccaccttcaagaagacctttaaacaccttctcatgtgtcattataagaacataggcgctacaaggtaccgtactcgagagaggagggcccgcttcgtgtccaagaaaggcaactgcaacgtcgcccacaagaacattcgagagcagggccgcttcctgcaggatgtgttcaccacgctggtggacctcaaatggccacacactctgctcattttcaccatgtccttcctgtgcagctggctgctctttgccatggtctggtggctcatcgccttcgcccacggtgacctggcccccggagagggcaccaatgtgccctgcgtcacaagcatccactccttttcatctgccttccttttctccatcgaggtccaggtgaccattggtttcggcgggcgcatggtgacagaggaatgtcccctggccatcctcattctcattgtgcagaatatcgtcgggctgatgatcaacgccatcatgctgggctgcatcttcatgaaaacggcccaggcacatcggcgggcagaaaccctcatcttcagcaagcatgctgtgatcaccctgcgccatggccgcctgtgcttcatgctgcgcgtaggggacctccgaaagagcatgatcattagcgccaccatccacatgcaggtggtgcgcaagaccaccagccccgagggcgaagttgtgcctctccaccaggtagacatccccatggagaatggcgtgggtggtaacggcatcttcctggtggccccactcatcatctaccacgtcatcgactccaacagcccgctctacgacctggctcctagtgacctgcaccaccaccaggacctggagatcattgtcatcttggaaggcgtggtagaaaccacgggcatcaccacccaggcccgcacctcctacctagctgacgagattctatgggggcagcgctttgtccccattgtggccgaggaggacggccgctattctgtggactactccaaatttggtaacaccattaaagtgcccacaccactctgcacagcccgccagcttgatgaggaccgcagt

SEQ ID NO: 52 - protein, 795 aa, Artificial sequence
  Synthetic Construct
MNNSTNSSNNSLALTSPYKTFEVVFIVLVAGSLSLVTIIGNILVMVSIKVNRHLQTVNNYFLFSLACADLIIGVFSMNLYTLYTVIGYWPLGPVVCDLWLALDYVVSNASVMNLLIISFDRYFCVTKPLTYPVKRTTKMAGMMIAAAWVLSFILWAPAILFWQFIVGVRTVEDGECYIQFFSNAAVTFGTAIAAFYLPVIIMTVLYWHISRASKSRIKKDKKEPVANQDPVSPSLVQGRIVKPNNNNMPSSDDGLEHNKIQNGKAPRDPVTENCVQGEEKESSNDSTSVSAVASNMRDDEITQDENTVSTSLGHSKDENSKQTCIRIGTKTPKSDSCTPTNTTVEVVGSSGQNGDEKQNIVARKIVKMTKQPAKKKPPPSREKKVTRTILAILLAFIITWAPYNVMVLINTFCAPCIPNTVWTIGYWLCYINSTINPACYALCNATFKKTFKHLLMCHYKNIGATRYRTRERRARFVSKKGNCNVAHKNIREQGRFLQDVFTTLVDLKWPHTLLIFTMSFLCSWLLFAMVWWLIAFAHGDLAPGEGTNVPCVTSIHSFSSAFLFSIEVQVTIGFGGRMVTEECPLAILILIVQNIVGLMINAIMLGCIFMKTAQAHRRAETLIFSKHAVITLRHGRLCFMLRVGDLRKSMIISATIHMQVVRKTTSPEGEVVPLHQVDIPMENGVGGNGIFLVAPLIIYHVIDSNSPLYDLAPSDLHHHQDLEIIVILEGVVETTGITTQARTSYLADEILWGQRFVPIVAEEDGRYSVDYSKFGNTIKVPTPLCTARQLDEDRS

SEQ ID NO: 53 - DNA, 2430 bp, Artificial sequence
  hybrid sequence
  CDS (1)..(2430)
atgaataactcaacaaactcctctaacaatagcctggctcttacaagtccttataagacatttgaagtggtgtttattgtcctggtggctggatccctcagtttggtgaccattatcgggaacatcctagtcatggtttccattaaagtcaaccgccacctccagaccgtcaacaattactttttattcagcttggcctgtgctgaccttatcataggtgttttctccatgaacttgtacaccctctacactgtgattggttactggcctttgggacctgtggtgtgtgacctttggctagccctggactatgtggtcagcaatgcctcagttatgaatctgctcatcatcagctttgacaggtacttctgtgtcacaaaacctctgacctacccagtcaagcggaccacaaaaatggcaggtatgatgattgcagctgcctgggtcctctctttcatcctctgggctccagccattctcttctggcagttcattgtaggggtgagaactgtggaggatggggagtgctacattcagtttttttccaatgctgctgtcacctttggtacggctattgcagccttctatttgccagtgatcatcatgactgtgctatattggcacatatcccgagccagcaagagcaggataaagaaggacaagaaggagcctgttgccaaccaagaccccgtttctccaagtctggtacaaggaaggatagtgaagccaaacaataacaacatgcccagcagtgacgatggcctggagcacaacaaaatccagaatggcaaagcccccagggatcctgtgactgaaaactgtgttcagggagaggagaaggagagctccaatgactccacctcagtcagtgctgttgcctctaatatgagagatgatgaaataacccaggatgaaaacacagtttccacttccctgggccattccaaagatgagaactctaagcaaacatgcatcagaattggcaccaagaccccaaaaagtgactcatgtaccccaactaataccaccgtggaggtagtggggtcttcaggtcagaatggagatgaaaagcagaatattgtagcccgcaagattgtgaagatgactaagcagcctgcaaaaaagaagcctcctccttcccgggaaaagaaagtcaccaggacaatcttggctattctgttggctttcatcatcacttgggccccatacaatgtcatggtgctcattaacaccttttgtgcaccttgcatccccaacactgtgtggacaattggttactggctttgttacatcaacagcactatcaaccctgcctgctatgcactttgcaatgccaccttcaagaagacctttaaacaccttctcatgtgtcattataagaacataggcgctacaaggaggagggcccgcttcgtgtccaagaaaggcaactgcaacgtcgcccacaagaacattcgagagcagggccgcttcctgcaggatgtgttcaccacgctggtggacctcaaatggccacacactctgctcattttcaccatgtccttcctgtgcagctggctgctctttgccatggtctggtggctcatcgccttcgcccacggtgatctctatgcttacatggagaaaggcatcacggacctggccccctacccatacgatgtaccagattacgccggagagggcaccaatgtgccctgcgtcacaagcatccactccttttcatctgccttccttttctccatcgaggtccaggtgaccattggtttcggcgggcgcatggtgacagaggaatgtcccctggccatcctcattctcattgtgcagaatatcgtcgggctgatgatcaacgccatcatgctgggctgcatcttcatgaaaacggcccaggcacatcggcgggcagaaaccctcatcttcagcaagcatgctgtgatcaccctgcgccatggccgcctgtgcttcatgctgcgcgtaggggacctccgaaagagcatgatcattagcgccaccatccacatgcaggtggtgcgcaagaccaccagccccgagggcgaagttgtgcctctccaccaggtagacatccccatggagaatggcgtgggtggtaacggcatcttcctggtggccccactcatcatctaccacgtcatcgactccaacagcccgctctacgacctggctcctagtgacctgcaccaccaccaggacctggagatcattgtcatcttggaaggcgtggtagaaaccacgggcatcaccacccaggcccgcacctcctacctagctgacgagattctatgggggcagcgctttgtccccattgtggccgaggaggacggccgctattctgtggactactccaaatttggtaacaccattaaagtgcccacaccactctgcacagcccgccagcttgatgaggaccgcagt

SEQ ID NO: 54 - protein, 810 aa, Artificial sequence
  Synthetic Construct
MNNSTNSSNNSLALTSPYKTFEVVFIVLVAGSLSLVTIIGNILVMVSIKVNRHLQTVNNYFLFSLACADLIIGVFSMNLYTLYTVIGYWPLGPVVCDLWLALDYVVSNASVMNLLIISFDRYFCVTKPLTYPVKRTTKMAGMMIAAAWVLSFILWAPAILFWQFIVGVRTVEDGECYIQFFSNAAVTFGTAIAAFYLPVIIMTVLYWHISRASKSRIKKDKKEPVANQDPVSPSLVQGRIVKPNNNNMPSSDDGLEHNKIQNGKAPRDPVTENCVQGEEKESSNDSTSVSAVASNMRDDEITQDENTVSTSLGHSKDENSKQTCIRIGTKTPKSDSCTPTNTTVEVVGSSGQNGDEKQNIVARKIVKMTKQPAKKKPPPSREKKVTRTILAILLAFIITWAPYNVMVLINTFCAPCIPNTVWTIGYWLCYINSTINPACYALCNATFKKTFKHLLMCHYKNIGATRRRARFVSKKGNCNVAHKNIREQGRFLQDVFTTLVDLKWPHTLLIFTMSFLCSWLLFAMVWWLIAFAHGDLYAYMEKGITDLAPYPYDVPDYAGEGTNVPCVTSIHSFSSAFLFSIEVQVTIGFGGRMVTEECPLAILILIVQNIVGLMINAIMLGCIFMKTAQAHRRAETLIFSKHAVITLRHGRLCFMLRVGDLRKSMIISATIHMQVVRKTTSPEGEVVPLHQVDIPMENGVGGNGIFLVAPLIIYHVIDSNSPLYDLAPSDLHHHQDLEIIVILEGVVETTGITTQARTSYLADEILWGQRFVPIVAEEDGRYSVDYSKFGNTIKVPTPLCTARQLDEDRS

SEQ ID NO: 55 - DNA, 2538 bp, Artificial sequence
  hybrid sequence
  CDS (1)..(2538)
atgaataactcaacaaactcctctaacaatagcctggctcttacaagtccttataagacatttgaagtggtgtttattgtcctggtggctggatccctcagtttggtgaccattatcgggaacatcctagtcatggtttccattaaagtcaaccgccacctccagaccgtcaacaattactttttattcagcttggcctgtgctgaccttatcataggtgttttctccatgaacttgtacaccctctacactgtgattggttactggcctttgggacctgtggtgtgtgacctttggctagccctggactatgtggtcagcaatgcctcagttatgaatctgctcatcatcagctttgacaggtacttctgtgtcacaaaacctctgacctacccagtcaagcggaccacaaaaatggcaggtatgatgattgcagctgcctgggtcctctctttcatcctctgggctccagccattctcttctggcagttcattgtaggggtgagaactgtggaggatggggagtgctacattcagtttttttccaatgctgctgtcacctttggtacggctattgcagccttctatttgccagtgatcatcatgactgtgctatattggcacatatcccgagccagcaagagcaggataaagaaggacaagaaggagcctgttgccaaccaagaccccgtttctccaagtctggtacaaggaaggatagtgaagccaaacaataacaacatgcccagcagtgacgatggcctggagcacaacaaaatccagaatggcaaagcccccagggatcctgtgactgaaaactgtgttcagggagaggagaaggagagctccaatgactccacctcagtcagtgctgttgcctctaatatgagagatgatgaaataacccaggatgaaaacacagtttccacttccctgggccattccaaagatgagaactctaagcaaacatgcatcagaattggcaccaagaccccaaaaagtgactcatgtaccccaactaataccaccgtggaggtagtggggtcttcaggtcagaatggagatgaaaagcagaatattgtagcccgcaagattgtgaagatgactaagcagcctgcaaaaaagaagcctcctccttcccgggaaaagaaagtcaccaggacaatcttggctattctgttggctttcatcatcacttgggccccatacaatgtcatggtgctcattaacaccttttgtgcaccttgcatccccaacactgtgtggacaattggttactggctttgttacatcaacagcactatcaaccctgcctgctatgcactttgcaatgccaccttcaagaagacctttaaacaccttctcatgtgtcattataagaacataggcgctacaaggaggagggcccgcttcgtgtccaagaaaggcaactgcaacgtcgcccacaagaacattcgagagcagggccgcttcctgcaggatgtgttcaccacgctggtggacctcaaatggccacacactctgctcattttcaccatgtccttcctgtgcagctggctgctctttgccatggtctggtggctcatcgccttcgcccacggtgatctctatgcttacatggagaaaggcatcacggacctggccccctacccatacgatgtaccagattacgccggagagggcaccaatgtgccctgcgtcacaagcatccactccttttcatctgccttccttttctccatcgaggtccaggtgaccattggtttcggcgggcgcatggtgacagaggaatgtcccctggccatcctcattctcattgtgcagaatatcgtcgggctgatgatcaacgccatcatgctgggctgcatcttcatgaaaacggcccaggcacatcggcgggcagaaaccctcatcttcagcaagcatgctgtgatcaccctgcgccatggccgcctgtgcttcatgctgcgcgtaggggacctccgaaagagcatgatcattagcgccaccatccacatgcaggtggtgcgcaagaccaccagccccgagggcgaagttgtgcctctccaccaggtagacatccccatggagaatggcgtgggtggtaacggcatcttcctggtggccccactcatcatctaccacgtcatcgactccaacagcccgctctacgacctggctcctagtgacctgcaccaccaccaggacctggagatcattgtcatcttggaaggcgtggtagaaaccacgggcatcaccacccaggcccgcacctcctacctagctgacgagattctatgggggcagcgctttgtccccattgtggccgaggaggacggccgctattctgtggactactccaaatttggtaacaccattaaagtgcccacaccactctgcacagcccgccagcttgatgaggaccgcagtctgctggatgccctgaccctcgcctcgtcgcgggggcccctgcgcaagcgcagtgtggctgtggcgaaggccaagcccaagtttagcatctctccagattccttgtcc

SEQ ID NO: 56 - protein, 846 aa, Artificial sequence
  Synthetic Construct
MNNSTNSSNNSLALTSPYKTFEVVFIVLVAGSLSLVTIIGNILVMVSIKVNRHLQTVNNYFLFSLACADLIIGVFSMNLYTLYTVIGYWPLGPVVCDLWLALDYVVSNASVMNLLIISFDRYFCVTKPLTYPVKRTTKMAGMMIAAAWVLSFILWAPAILFWQFIVGVRTVEDGECYIQFFSNAAVTFGTAIAAFYLPVIIMTVLYWHISRASKSRIKKDKKEPVANQDPVSPSLVQGRIVKPNNNNMPSSDDGLEHNKIQNGKAPRDPVTENCVQGEEKESSNDSTSVSAVASNMRDDEITQDENTVSTSLGHSKDENSKQTCIRIGTKTPKSDSCTPTNTTVEVVGSSGQNGDEKQNIVARKIVKMTKQPAKKKPPPSREKKVTRTILAILLAFIITWAPYNVMVLINTFCAPCIPNTVWTIGYWLCYINSTINPACYALCNATFKKTFKHLLMCHYKNIGATRRRARFVSKKGNCNVAHKNIREQGRFLQDVFTTLVDLKWPHTLLIFTMSFLCSWLLFAMVWWLIAFAHGDLYAYMEKGITDLAPYPYDVPDYAGEGTNVPCVTSIHSFSSAFLFSIEVQVTIGFGGRMVTEECPLAILILIVQNIVGLMINAIMLGCIFMKTAQAHRRAETLIFSKHAVITLRHGRLCFMLRVGDLRKSMIISATIHMQVVRKTTSPEGEVVPLHQVDIPMENGVGGNGIFLVAPLIIYHVIDSNSPLYDLAPSDLHHHQDLEIIVILEGVVETTGITTQARTSYLADEILWGQRFVPIVAEEDGRYSVDYSKFGNTIKVPTPLCTARQLDEDRSLLDALTLASSRGPLRKRSVAVAKAKPKFSISPDSLS

SEQ ID NO: 57 - DNA, 2478 bp, Artificial sequence
  hybrid sequence
  CDS (1)..(2478)
atgaataactcaacaaactcctctaacaatagcctggctcttacaagtccttataagacatttgaagtggtgtttattgtcctggtggctggatccctcagtttggtgaccattatcgggaacatcctagtcatggtttccattaaagtcaaccgccacctccagaccgtcaacaattactttttattcagcttggcctgtgctgaccttatcataggtgttttctccatgaacttgtacaccctctacactgtgattggttactggcctttgggacctgtggtgtgtgacctttggctagccctggactatgtggtcagcaatgcctcagttatgaatctgctcatcatcagctttgacaggtacttctgtgtcacaaaacctctgacctacccagtcaagcggaccacaaaaatggcaggtatgatgattgcagctgcctgggtcctctctttcatcctctgggctccagccattctcttctggcagttcattgtaggggtgagaactgtggaggatggggagtgctacattcagtttttttccaatgctgctgtcacctttggtacggctattgcagccttctatttgccagtgatcatcatgactgtgctatattggcacatatcccgagccagcaagagcaggataaagaaggacaagaaggagcctgttgccaaccaagaccccgtttctccaagtctggtacaaggaaggatagtgaagccaaacaataacaacatgcccagcagtgacgatggcctggagcacaacaaaatccagaatggcaaagcccccagggatcctgtgactgaaaactgtgttcagggagaggagaaggagagctccaatgactccacctcagtcagtgctgttgcctctaatatgagagatgatgaaataacccaggatgaaaacacagtttccacttccctgggccattccaaagatgagaactctaagcaaacatgcatcagaattggcaccaagaccccaaaaagtgactcatgtaccccaactaataccaccgtggaggtagtggggtcttcaggtcagaatggagatgaaaagcagaatattgtagcccgcaagattgtgaagatgactaagcagcctgcaaaaaagaagcctcctccttcccgggaaaagaaagtcaccaggacaatcttggctattctgttggctttcatcatcacttgggccccatacaatgtcatggtgctcattaacaccttttgtgcaccttgcatccccaacactgtgtggacaattggttactggctttgttacatcaacagcactatcaaccctgcctgctatgcactttgcaatgccaccttcaagaagacctttaaacaccttctcatgtgtcattataagaacataggcgctacaaggaggagggcccgcttcgtgtccaagaaaggcaactgcaacgtcgcccacaagaacattcgagagcagggccgcttcctgcaggatgtgttcaccacgctggtggacctcaaatggccacacactctgctcattttcaccatgtccttcctgtgcagctggctgctctttgccatggtctggtggctcatcgccttcgcccacggtgacctggcccccggagagggcaccaatgtgccctgcgtcacaagcatccactccttttcatctgccttccttttctccatcgaggtccaggtgaccattggtttcggcgggcgcatggtgacagaggaatgtcccctggccatcctcattctcattgtgcagaatatcgtcgggctgatgatcaacgccatcatgctgggctgcatcttcatgaaaacggcccaggcacatcggcgggcagaaaccctcatcttcagcaagcatgctgtgatcaccctgcgccatggccgcctgtgcttcatgctgcgcgtaggggacctccgaaagagcatgatcattagcgccaccatccacatgcaggtggtgcgcaagaccaccagccccgagggcgaagttgtgcctctccaccaggtagacatccccatggagaatggcgtgggtggtaacggcatcttcctggtggccccactcatcatctaccacgtcatcgactccaacagcccgctctacgacctggctcctagtgacctgcaccaccaccaggacctggagatcattgtcatcttggaaggcgtggtagaaaccacgggcatcaccacccaggcccgcacctcctacctagctgacgagattctatgggggcagcgctttgtccccattgtggccgaggaggacggccgctattctgtggactactccaaatttggtaacaccattaaagtgcccacaccactctgcacagcccgccagcttgatgaggaccgcagtctgctggatgccctgaccctcgcctcgtcgcgggggcccctgcgcaagcgcagtgtggctgtggcgaaggccaagcccaagtttagcatctctccagattccttgtcc

SEQ ID NO: 58 - protein, 826 aa, Artificial sequence
  Synthetic Construct
MNNSTNSSNNSLALTSPYKTFEVVFIVLVAGSLSLVTIIGNILVMVSIKVNRHLQTVNNYFLFSLACADLIIGVFSMNLYTLYTVIGYWPLGPVVCDLWLALDYVVSNASVMNLLIISFDRYFCVTKPLTYPVKRTTKMAGMMIAAAWVLSFILWAPAILFWQFIVGVRTVEDGECYIQFFSNAAVTFGTAIAAFYLPVIIMTVLYWHISRASKSRIKKDKKEPVANQDPVSPSLVQGRIVKPNNNNMPSSDDGLEHNKIQNGKAPRDPVTENCVQGEEKESSNDSTSVSAVASNMRDDEITQDENTVSTSLGHSKDENSKQTCIRIGTKTPKSDSCTPTNTTVEVVGSSGQNGDEKQNIVARKIVKMTKQPAKKKPPPSREKKVTRTILAILLAFIITWAPYNVMVLINTFCAPCIPNTVWTIGYWLCYINSTINPACYALCNATFKKTFKHLLMCHYKNIGATRRRARFVSKKGNCNVAHKNIREQGRFLQDVFTTLVDLKWPHTLLIFTMSFLCSWLLFAMVWWLIAFAHGDLAPGEGTNVPCVTSIHSFSSAFLFSIEVQVTIGFGGRMVTEECPLAILILIVQNIVGLMINAIMLGCIFMKTAQAHRRAETLIFSKHAVITLRHGRLCFMLRVGDLRKSMIISATIHMQVVRKTTSPEGEVVPLHQVDIPMENGVGGNGIFLVAPLIIYHVIDSNSPLYDLAPSDLHHHQDLEIIVILEGVVETTGITTQARTSYLADEILWGQRFVPIVAEEDGRYSVDYSKFGNTIKVPTPLCTARQLDEDRSLLDALTLASSRGPLRKRSVAVAKAKPKFSISPDSLS

SEQ ID NO: 59 - DNA, 2370 bp, Artificial sequence
  hybrid sequence
  CDS (1)..(2370)
atgaataactcaacaaactcctctaacaatagcctggctcttacaagtccttataagacatttgaagtggtgtttattgtcctggtggctggatccctcagtttggtgaccattatcgggaacatcctagtcatggtttccattaaagtcaaccgccacctccagaccgtcaacaattactttttattcagcttggcctgtgctgaccttatcataggtgttttctccatgaacttgtacaccctctacactgtgattggttactggcctttgggacctgtggtgtgtgacctttggctagccctggactatgtggtcagcaatgcctcagttatgaatctgctcatcatcagctttgacaggtacttctgtgtcacaaaacctctgacctacccagtcaagcggaccacaaaaatggcaggtatgatgattgcagctgcctgggtcctctctttcatcctctgggctccagccattctcttctggcagttcattgtaggggtgagaactgtggaggatggggagtgctacattcagtttttttccaatgctgctgtcacctttggtacggctattgcagccttctatttgccagtgatcatcatgactgtgctatattggcacatatcccgagccagcaagagcaggataaagaaggacaagaaggagcctgttgccaaccaagaccccgtttctccaagtctggtacaaggaaggatagtgaagccaaacaataacaacatgcccagcagtgacgatggcctggagcacaacaaaatccagaatggcaaagcccccagggatcctgtgactgaaaactgtgttcagggagaggagaaggagagctccaatgactccacctcagtcagtgctgttgcctctaatatgagagatgatgaaataacccaggatgaaaacacagtttccacttccctgggccattccaaagatgagaactctaagcaaacatgcatcagaattggcaccaagaccccaaaaagtgactcatgtaccccaactaataccaccgtggaggtagtggggtcttcaggtcagaatggagatgaaaagcagaatattgtagcccgcaagattgtgaagatgactaagcagcctgcaaaaaagaagcctcctccttcccgggaaaagaaagtcaccaggacaatcttggctattctgttggctttcatcatcacttgggccccatacaatgtcatggtgctcattaacaccttttgtgcaccttgcatccccaacactgtgtggacaattggttactggctttgttacatcaacagcactatcaaccctgcctgctatgcactttgcaatgccaccttcaagaagacctttaaacaccttctcatgtgtcattataagaacataggcgctacaaggaggagggcccgcttcgtgtccaagaaaggcaactgcaacgtcgcccacaagaacattcgagagcagggccgcttcctgcaggatgtgttcaccacgctggtggacctcaaatggccacacactctgctcattttcaccatgtccttcctgtgcagctggctgctctttgccatggtctggtggctcatcgccttcgcccacggtgacctggcccccggagagggcaccaatgtgccctgcgtcacaagcatccactccttttcatctgccttccttttctccatcgaggtccaggtgaccattggtttcggcgggcgcatggtgacagaggaatgtcccctggccatcctcattctcattgtgcagaatatcgtcgggctgatgatcaacgccatcatgctgggctgcatcttcatgaaaacggcccaggcacatcggcgggcagaaaccctcatcttcagcaagcatgctgtgatcaccctgcgccatggccgcctgtgcttcatgctgcgcgtaggggacctccgaaagagcatgatcattagcgccaccatccacatgcaggtggtgcgcaagaccaccagccccgagggcgaagttgtgcctctccaccaggtagacatccccatggagaatggcgtgggtggtaacggcatcttcctggtggccccactcatcatctaccacgtcatcgactccaacagcccgctctacgacctggctcctagtgacctgcaccaccaccaggacctggagatcattgtcatcttggaaggcgtggtagaaaccacgggcatcaccacccaggcccgcacctcctacctagctgacgagattctatgggggcagcgctttgtccccattgtggccgaggaggacggccgctattctgtggactactccaaatttggtaacaccattaaagtgcccacaccactctgcacagcccgccagcttgatgaggaccgcagt

SEQ ID NO: 60 - protein, 790 aa, Artificial sequence
  Synthetic Construct
MNNSTNSSNNSLALTSPYKTFEVVFIVLVAGSLSLVTIIGNILVMVSIKVNRHLQTVNNYFLFSLACADLIIGVFSMNLYTLYTVIGYWPLGPVVCDLWLALDYVVSNASVMNLLIISFDRYFCVTKPLTYPVKRTTKMAGMMIAAAWVLSFILWAPAILFWQFIVGVRTVEDGECYIQFFSNAAVTFGTAIAAFYLPVIIMTVLYWHISRASKSRIKKDKKEPVANQDPVSPSLVQGRIVKPNNNNMPSSDDGLEHNKIQNGKAPRDPVTENCVQGEEKESSNDSTSVSAVASNMRDDEITQDENTVSTSLGHSKDENSKQTCIRIGTKTPKSDSCTPTNTTVEVVGSSGQNGDEKQNIVARKIVKMTKQPAKKKPPPSREKKVTRTILAILLAFIITWAPYNVMVLINTFCAPCIPNTVWTIGYWLCYINSTINPACYALCNATFKKTFKHLLMCHYKNIGATRRRARFVSKKGNCNVAHKNIREQGRFLQDVFTTLVDLKWPHTLLIFTMSFLCSWLLFAMVWWLIAFAHGDLAPGEGTNVPCVTSIHSFSSAFLFSIEVQVTIGFGGRMVTEECPLAILILIVQNIVGLMINAIMLGCIFMKTAQAHRRAETLIFSKHAVITLRHGRLCFMLRVGDLRKSMIISATIHMQVVRKTTSPEGEVVPLHQVDIPMENGVGGNGIFLVAPLIIYHVIDSNSPLYDLAPSDLHHHQDLEIIVILEGVVETTGITTQARTSYLADEILWGQRFVPIVAEEDGRYSVDYSKFGNTIKVPTPLCTARQLDEDRS

SEQ ID NO: 61 - DNA, 2376 bp, Artificial sequence
  hybrid sequence
  CDS (1)..(2376)
atggatccactgaatctgtcctggtatgatgatgatctggagaggcagaactggagccggcccttcaacgggtcagacgggaaggcggacagaccccactacaactactatgccacactgctcaccctgctcatcgctgtcatcgtcttcggcaacgtgctggtgtgcatggctgtgtcccgcgagaaggcgctgcagaccaccaccaactacctgatcgtcagcctcgcagtggccgacctcctcgtcgccacactggtcatgccctgggttgtctacctggaggtggtaggtgagtggaaattcagcaggattcactgtgacatcttcgtcactctggacgtcatgatgtgcacggcgagcatcctgaacttgtgtgccatcagcatcgacaggtacacagctgtggccatgcccatgctgtacaatacgcgctacagctccaagcgccgggtcaccgtcatgatctccatcgtctgggtcctgtccttcaccatctcctgcccactcctcttcggactcaataacgcagaccagaacgagtgcatcattgccaacccggccttcgtggtctactcctccatcgtctccttctacgtgcccttcattgtcaccctgctggtctacatcaagatctacattgtcctccgcagacgccgcaagcgagtcaacaccaaacgcagcagccgagctttcagggcccacctgagggctccactaaagggcaactgtactcaccccgaggacatgaaactctgcaccgttatcatgaagtctaatgggagtttcccagtgaacaggcggagagtggaggctgcccggcgagcccaggagctggagatggagatgctctccagcaccagcccacccgagaggacccggtacagccccatcccacccagccaccaccagctgactctccccgacccgtcccaccatggtctccacagcactcccgacagccccgccaaaccagagaagaatgggcatgccaaagaccaccccaagattgccaagatctttgagatccagaccatgcccaatggcaaaacccggacctccctcaagaccatgagccgtaggaagctctcccagcagaaggagaagaaagccactcagatgctcgccattgttctcggcgtgttcatcatctgctggctgcccttcttcatcacacacatcctgaacatacactgtgactgcaacatcccgcctgtcctgtacagcgccttcacgtggctgggctatgtcaacagcgccgtgaaccccatcatctacaccaccttcaacattgagttccgcaaggccttcctgaagatcctccactgctaccgtactcgagagaggagggcccgcttcgtgtccaagaaaggcaactgcaacgtcgcccacaagaacattcgagagcagggccgcttcctgcaggatgtgttcaccacgctggtggacctcaaatggccacacactctgctcattttcaccatgtccttcctgtgcagctggctgctctttgccatggtctggtggctcatcgccttcgcccacggtgatctctatgcttacatggagaaaggcatcacggacctggccccctacccatacgatgtaccagattacgccggagagggcaccaatgtgccctgcgtcacaagcatccactccttttcatctgccttccttttctccatcgaggtccaggtgaccattggtttcggcgggcgcatggtgacagaggaatgtcccctggccatcctcattctcattgtgcagaatatcgtcgggctgatgatcaacgccatcatgctgggctgcatcttcatgaaaacggcccaggcacatcggcgggcagaaaccctcatcttcagcaagcatgctgtgatcaccctgcgccatggccgcctgtgcttcatgctgcgcgtaggggacctccgaaagagcatgatcattagcgccaccatccacatgcaggtggtgcgcaagaccaccagccccgagggcgaagttgtgcctctccaccaggtagacatccccatggagaatggcgtgggtggtaacggcatcttcctggtggccccactcatcatctaccacgtcatcgactccaacagcccgctctacgacctggctcctagtgacctgcaccaccaccaggacctggagatcattgtcatcttggaaggcgtggtagaaaccacgggcatcaccacccaggcccgcacctcctacctagctgacgagattctatgggggcagcgctttgtccccattgtggccgaggaggacggccgctattctgtggactactccaaatttggtaacaccattaaagtgcccacaccactctgcacagcccgccagcttgatgaggaccgcagt

SEQ ID NO: 62 - protein, 792 aa, Artificial sequence
  Synthetic Construct
MDPLNLSWYDDDLERQNWSRPFNGSDGKADRPHYNYYATLLTLLIAVIVFGNVLVCMAVSREKALQTTTNYLIVSLAVADLLVATLVMPWVVYLEVVGEWKFSRIHCDIFVTLDVMMCTASILNLCAISIDRYTAVAMPMLYNTRYSSKRRVTVMISIVWVLSFTISCPLLFGLNNADQNECIIANPAFVVYSSIVSFYVPFIVTLLVYIKIYIVLRRRRKRVNTKRSSRAFRAHLRAPLKGNCTHPEDMKLCTVIMKSNGSFPVNRRRVEAARRAQELEMEMLSSTSPPERTRYSPIPPSHHQLTLPDPSHHGLHSTPDSPAKPEKNGHAKDHPKIAKIFEIQTMPNGKTRTSLKTMSRRKLSQQKEKKATQMLAIVLGVFIICWLPFFITHILNIHCDCNIPPVLYSAFTWLGYVNSAVNPIIYTTFNIEFRKAFLKILHCYRTRERRARFVSKKGNCNVAHKNIREQGRFLQDVFTTLVDLKWPHTLLIFTMSFLCSWLLFAMVWWLIAFAHGDLYAYMEKGITDLAPYPYDVPDYAGEGTNVPCVTSIHSFSSAFLFSIEVQVTIGFGGRMVTEECPLAILILIVQNIVGLMINAIMLGCIFMKTAQAHRRAETLIFSKHAVITLRHGRLCFMLRVGDLRKSMIISATIHMQVVRKTTSPEGEVVPLHQVDIPMENGVGGNGIFLVAPLIIYHVIDSNSPLYDLAPSDLHHHQDLEIIVILEGVVETTGITTQARTSYLADEILWGQRFVPIVAEEDGRYSVDYSKFGNTIKVPTPLCTARQLDEDRS

SEQ ID NO: 63 - DNA, 2484 bp, Artificial sequence
  hybrid sequence
  CDS (1)..(2484)
atggatccactgaatctgtcctggtatgatgatgatctggagaggcagaactggagccggcccttcaacgggtcagacgggaaggcggacagaccccactacaactactatgccacactgctcaccctgctcatcgctgtcatcgtcttcggcaacgtgctggtgtgcatggctgtgtcccgcgagaaggcgctgcagaccaccaccaactacctgatcgtcagcctcgcagtggccgacctcctcgtcgccacactggtcatgccctgggttgtctacctggaggtggtaggtgagtggaaattcagcaggattcactgtgacatcttcgtcactctggacgtcatgatgtgcacggcgagcatcctgaacttgtgtgccatcagcatcgacaggtacacagctgtggccatgcccatgctgtacaatacgcgctacagctccaagcgccgggtcaccgtcatgatctccatcgtctgggtcctgtccttcaccatctcctgcccactcctcttcggactcaataacgcagaccagaacgagtgcatcattgccaacccggccttcgtggtctactcctccatcgtctccttctacgtgcccttcattgtcaccctgctggtctacatcaagatctacattgtcctccgcagacgccgcaagcgagtcaacaccaaacgcagcagccgagctttcagggcccacctgagggctccactaaagggcaactgtactcaccccgaggacatgaaactctgcaccgttatcatgaagtctaatgggagtttcccagtgaacaggcggagagtggaggctgcccggcgagcccaggagctggagatggagatgctctccagcaccagcccacccgagaggacccggtacagccccatcccacccagccaccaccagctgactctccccgacccgtcccaccatggtctccacagcactcccgacagccccgccaaaccagagaagaatgggcatgccaaagaccaccccaagattgccaagatctttgagatccagaccatgcccaatggcaaaacccggacctccctcaagaccatgagccgtaggaagctctcccagcagaaggagaagaaagccactcagatgctcgccattgttctcggcgtgttcatcatctgctggctgcccttcttcatcacacacatcctgaacatacactgtgactgcaacatcccgcctgtcctgtacagcgccttcacgtggctgggctatgtcaacagcgccgtgaaccccatcatctacaccaccttcaacattgagttccgcaaggccttcctgaagatcctccactgctaccgtactcgagagaggagggcccgcttcgtgtccaagaaaggcaactgcaacgtcgcccacaagaacattcgagagcagggccgcttcctgcaggatgtgttcaccacgctggtggacctcaaatggccacacactctgctcattttcaccatgtccttcctgtgcagctggctgctctttgccatggtctggtggctcatcgccttcgcccacggtgatctctatgcttacatggagaaaggcatcacggacctggccccctacccatacgatgtaccagattacgccggagagggcaccaatgtgccctgcgtcacaagcatccactccttttcatctgccttccttttctccatcgaggtccaggtgaccattggtttcggcgggcgcatggtgacagaggaatgtcccctggccatcctcattctcattgtgcagaatatcgtcgggctgatgatcaacgccatcatgctgggctgcatcttcatgaaaacggcccaggcacatcggcgggcagaaaccctcatcttcagcaagcatgctgtgatcaccctgcgccatggccgcctgtgcttcatgctgcgcgtaggggacctccgaaagagcatgatcattagcgccaccatccacatgcaggtggtgcgcaagaccaccagccccgagggcgaagttgtgcctctccaccaggtagacatccccatggagaatggcgtgggtggtaacggcatcttcctggtggccccactcatcatctaccacgtcatcgactccaacagcccgctctacgacctggctcctagtgacctgcaccaccaccaggacctggagatcattgtcatcttggaaggcgtggtagaaaccacgggcatcaccacccaggcccgcacctcctacctagctgacgagattctatgggggcagcgctttgtccccattgtggccgaggaggacggccgctattctgtggactactccaaatttggtaacaccattaaagtgcccacaccactctgcacagcccgccagcttgatgaggaccgcagtctgctggatgccctgaccctcgcctcgtcgcgggggcccctgcgcaagcgcagtgtggctgtggcgaaggccaagcccaagtttagcatctctccagattccttgtcc

SEQ ID NO: 64 - protein, 828 aa, Artificial sequence
  Synthetic Construct
MDPLNLSWYDDDLERQNWSRPFNGSDGKADRPHYNYYATLLTLLIAVIVFGNVLVCMAVSREKALQTTTNYLIVSLAVADLLVATLVMPWVVYLEVVGEWKFSRIHCDIFVTLDVMMCTASILNLCAISIDRYTAVAMPMLYNTRYSSKRRVTVMISIVWVLSFTISCPLLFGLNNADQNECIIANPAFVVYSSIVSFYVPFIVTLLVYIKIYIVLRRRRKRVNTKRSSRAFRAHLRAPLKGNCTHPEDMKLCTVIMKSNGSFPVNRRRVEAARRAQELEMEMLSSTSPPERTRYSPIPPSHHQLTLPDPSHHGLHSTPDSPAKPEKNGHAKDHPKIAKIFEIQTMPNGKTRTSLKTMSRRKLSQQKEKKATQMLAIVLGVFIICWLPFFITHILNIHCDCNIPPVLYSAFTWLGYVNSAVNPIIYTTFNIEFRKAFLKILHCYRTRERRARFVSKKGNCNVAHKNIREQGRFLQDVFTTLVDLKWPHTLLIFTMSFLCSWLLFAMVWWLIAFAHGDLYAYMEKGITDLAPYPYDVPDYAGEGTNVPCVTSIHSFSSAFLFSIEVQVTIGFGGRMVTEECPLAILILIVQNIVGLMINAIMLGCIFMKTAQAHRRAETLIFSKHAVITLRHGRLCFMLRVGDLRKSMIISATIHMQVVRKTTSPEGEVVPLHQVDIPMENGVGGNGIFLVAPLIIYHVIDSNSPLYDLAPSDLHHHQDLEIIVILEGVVETTGITTQARTSYLADEILWGQRFVPIVAEEDGRYSVDYSKFGNTIKVPTPLCTARQLDEDRSLLDALTLASSRGPLRKRSVAVAKAKPKFSISPDSLS

SEQ ID NO: 65 - DNA, 2424 bp, Artificial sequence
  hybrid sequence
  CDS (1)..(2424)
atggatccactgaatctgtcctggtatgatgatgatctggagaggcagaactggagccggcccttcaacgggtcagacgggaaggcggacagaccccactacaactactatgccacactgctcaccctgctcatcgctgtcatcgtcttcggcaacgtgctggtgtgcatggctgtgtcccgcgagaaggcgctgcagaccaccaccaactacctgatcgtcagcctcgcagtggccgacctcctcgtcgccacactggtcatgccctgggttgtctacctggaggtggtaggtgagtggaaattcagcaggattcactgtgacatcttcgtcactctggacgtcatgatgtgcacggcgagcatcctgaacttgtgtgccatcagcatcgacaggtacacagctgtggccatgcccatgctgtacaatacgcgctacagctccaagcgccgggtcaccgtcatgatctccatcgtctgggtcctgtccttcaccatctcctgcccactcctcttcggactcaataacgcagaccagaacgagtgcatcattgccaacccggccttcgtggtctactcctccatcgtctccttctacgtgcccttcattgtcaccctgctggtctacatcaagatctacattgtcctccgcagacgccgcaagcgagtcaacaccaaacgcagcagccgagctttcagggcccacctgagggctccactaaagggcaactgtactcaccccgaggacatgaaactctgcaccgttatcatgaagtctaatgggagtttcccagtgaacaggcggagagtggaggctgcccggcgagcccaggagctggagatggagatgctctccagcaccagcccacccgagaggacccggtacagccccatcccacccagccaccaccagctgactctccccgacccgtcccaccatggtctccacagcactcccgacagccccgccaaaccagagaagaatgggcatgccaaagaccaccccaagattgccaagatctttgagatccagaccatgcccaatggcaaaacccggacctccctcaagaccatgagccgtaggaagctctcccagcagaaggagaagaaagccactcagatgctcgccattgttctcggcgtgttcatcatctgctggctgcccttcttcatcacacacatcctgaacatacactgtgactgcaacatcccgcctgtcctgtacagcgccttcacgtggctgggctatgtcaacagcgccgtgaaccccatcatctacaccaccttcaacattgagttccgcaaggccttcctgaagatcctccactgctaccgtactcgagagaggagggcccgcttcgtgtccaagaaaggcaactgcaacgtcgcccacaagaacattcgagagcagggccgcttcctgcaggatgtgttcaccacgctggtggacctcaaatggccacacactctgctcattttcaccatgtccttcctgtgcagctggctgctctttgccatggtctggtggctcatcgccttcgcccacggtgacctggcccccggagagggcaccaatgtgccctgcgtcacaagcatccactccttttcatctgccttccttttctccatcgaggtccaggtgaccattggtttcggcgggcgcatggtgacagaggaatgtcccctggccatcctcattctcattgtgcagaatatcgtcgggctgatgatcaacgccatcatgctgggctgcatcttcatgaaaacggcccaggcacatcggcgggcagaaaccctcatcttcagcaagcatgctgtgatcaccctgcgccatggccgcctgtgcttcatgctgcgcgtaggggacctccgaaagagcatgatcattagcgccaccatccacatgcaggtggtgcgcaagaccaccagccccgagggcgaagttgtgcctctccaccaggtagacatccccatggagaatggcgtgggtggtaacggcatcttcctggtggccccactcatcatctaccacgtcatcgactccaacagcccgctctacgacctggctcctagtgacctgcaccaccaccaggacctggagatcattgtcatcttggaaggcgtggtagaaaccacgggcatcaccacccaggcccgcacctcctacctagctgacgagattctatgggggcagcgctttgtccccattgtggccgaggaggacggccgctattctgtggactactccaaatttggtaacaccattaaagtgcccacaccactctgcacagcccgccagcttgatgaggaccgcagtctgctggatgccctgaccctcgcctcgtcgcgggggcccctgcgcaagcgcagtgtggctgtggcgaaggccaagcccaagtttagcatctctccagattccttgtcc

SEQ ID NO: 66 - protein, 808 aa, Artificial sequence
  Synthetic Construct
MDPLNLSWYDDDLERQNWSRPFNGSDGKADRPHYNYYATLLTLLIAVIVFGNVLVCMAVSREKALQTTTNYLIVSLAVADLLVATLVMPWVVYLEVVGEWKFSRIHCDIFVTLDVMMCTASILNLCAISIDRYTAVAMPMLYNTRYSSKRRVTVMISIVWVLSFTISCPLLFGLNNADQNECIIANPAFVVYSSIVSFYVPFIVTLLVYIKIYIVLRRRRKRVNTKRSSRAFRAHLRAPLKGNCTHPEDMKLCTVIMKSNGSFPVNRRRVEAARRAQELEMEMLSSTSPPERTRYSPIPPSHHQLTLPDPSHHGLHSTPDSPAKPEKNGHAKDHPKIAKIFEIQTMPNGKTRTSLKTMSRRKLSQQKEKKATQMLAIVLGVFIICWLPFFITHILNIHCDCNIPPVLYSAFTWLGYVNSAVNPIIYTTFNIEFRKAFLKILHCYRTRERRARFVSKKGNCNVAHKNIREQGRFLQDVFTTLVDLKWPHTLLIFTMSFLCSWLLFAMVWWLIAFAHGDLAPGEGTNVPCVTSIHSFSSAFLFSIEVQVTIGFGGRMVTEECPLAILILIVQNIVGLMINAIMLGCIFMKTAQAHRRAETLIFSKHAVITLRHGRLCFMLRVGDLRKSMIISATIHMQVVRKTTSPEGEVVPLHQVDIPMENGVGGNGIFLVAPLIIYHVIDSNSPLYDLAPSDLHHHQDLEIIVILEGVVETTGITTQARTSYLADEILWGQRFVPIVAEEDGRYSVDYSKFGNTIKVPTPLCTARQLDEDRSLLDALTLASSRGPLRKRSVAVAKAKPKFSISPDSLS

SEQ ID NO: 67 - DNA, 2316 bp, Artificial sequence
  hybrid sequence
  CDS (1)..(2316)
atggatccactgaatctgtcctggtatgatgatgatctggagaggcagaactggagccggcccttcaacgggtcagacgggaaggcggacagaccccactacaactactatgccacactgctcaccctgctcatcgctgtcatcgtcttcggcaacgtgctggtgtgcatggctgtgtcccgcgagaaggcgctgcagaccaccaccaactacctgatcgtcagcctcgcagtggccgacctcctcgtcgccacactggtcatgccctgggttgtctacctggaggtggtaggtgagtggaaattcagcaggattcactgtgacatcttcgtcactctggacgtcatgatgtgcacggcgagcatcctgaacttgtgtgccatcagcatcgacaggtacacagctgtggccatgcccatgctgtacaatacgcgctacagctccaagcgccgggtcaccgtcatgatctccatcgtctgggtcctgtccttcaccatctcctgcccactcctcttcggactcaataacgcagaccagaacgagtgcatcattgccaacccggccttcgtggtctactcctccatcgtctccttctacgtgcccttcattgtcaccctgctggtctacatcaagatctacattgtcctccgcagacgccgcaagcgagtcaacaccaaacgcagcagccgagctttcagggcccacctgagggctccactaaagggcaactgtactcaccccgaggacatgaaactctgcaccgttatcatgaagtctaatgggagtttcccagtgaacaggcggagagtggaggctgcccggcgagcccaggagctggagatggagatgctctccagcaccagcccacccgagaggacccggtacagccccatcccacccagccaccaccagctgactctccccgacccgtcccaccatggtctccacagcactcccgacagccccgccaaaccagagaagaatgggcatgccaaagaccaccccaagattgccaagatctttgagatccagaccatgcccaatggcaaaacccggacctccctcaagaccatgagccgtaggaagctctcccagcagaaggagaagaaagccactcagatgctcgccattgttctcggcgtgttcatcatctgctggctgcccttcttcatcacacacatcctgaacatacactgtgactgcaacatcccgcctgtcctgtacagcgccttcacgtggctgggctatgtcaacagcgccgtgaaccccatcatctacaccaccttcaacattgagttccgcaaggccttcctgaagatcctccactgctaccgtactcgagagaggagggcccgcttcgtgtccaagaaaggcaactgcaacgtcgcccacaagaacattcgagagcagggccgcttcctgcaggatgtgttcaccacgctggtggacctcaaatggccacacactctgctcattttcaccatgtccttcctgtgcagctggctgctctttgccatggtctggtggctcatcgccttcgcccacggtgacctggcccccggagagggcaccaatgtgccctgcgtcacaagcatccactccttttcatctgccttccttttctccatcgaggtccaggtgaccattggtttcggcgggcgcatggtgacagaggaatgtcccctggccatcctcattctcattgtgcagaatatcgtcgggctgatgatcaacgccatcatgctgggctgcatcttcatgaaaacggcccaggcacatcggcgggcagaaaccctcatcttcagcaagcatgctgtgatcaccctgcgccatggccgcctgtgcttcatgctgcgcgtaggggacctccgaaagagcatgatcattagcgccaccatccacatgcaggtggtgcgcaagaccaccagccccgagggcgaagttgtgcctctccaccaggtagacatccccatggagaatggcgtgggtggtaacggcatcttcctggtggccccactcatcatctaccacgtcatcgactccaacagcccgctctacgacctggctcctagtgacctgcaccaccaccaggacctggagatcattgtcatcttggaaggcgtggtagaaaccacgggcatcaccacccaggcccgcacctcctacctagctgacgagattctatgggggcagcgctttgtccccattgtggccgaggaggacggccgctattctgtggactactccaaatttggtaacaccattaaagtgcccacaccactctgcacagcccgccagcttgatgaggaccgcagt

SEQ ID NO: 68 - protein, 772 aa, Artificial sequence
  Synthetic Construct
MDPLNLSWYDDDLERQNWSRPFNGSDGKADRPHYNYYATLLTLLIAVIVFGNVLVCMAVSREKALQTTTNYLIVSLAVADLLVATLVMPWVVYLEVVGEWKFSRIHCDIFVTLDVMMCTASILNLCAISIDRYTAVAMPMLYNTRYSSKRRVTVMISIVWVLSFTISCPLLFGLNNADQNECIIANPAFVVYSSIVSFYVPFIVTLLVYIKIYIVLRRRRKRVNTKRSSRAFRAHLRAPLKGNCTHPEDMKLCTVIMKSNGSFPVNRRRVEAARRAQELEMEMLSSTSPPERTRYSPIPPSHHQLTLPDPSHHGLHSTPDSPAKPEKNGHAKDHPKIAKIFEIQTMPNGKTRTSLKTMSRRKLSQQKEKKATQMLAIVLGVFIICWLPFFITHILNIHCDCNIPPVLYSAFTWLGYVNSAVNPIIYTTFNIEFRKAFLKILHCYRTRERRARFVSKKGNCNVAHKNIREQGRFLQDVFTTLVDLKWPHTLLIFTMSFLCSWLLFAMVWWLIAFAHGDLAPGEGTNVPCVTSIHSFSSAFLFSIEVQVTIGFGGRMVTEECPLAILILIVQNIVGLMINAIMLGCIFMKTAQAHRRAETLIFSKHAVITLRHGRLCFMLRVGDLRKSMIISATIHMQVVRKTTSPEGEVVPLHQVDIPMENGVGGNGIFLVAPLIIYHVIDSNSPLYDLAPSDLHHHQDLEIIVILEGVVETTGITTQARTSYLADEILWGQRFVPIVAEEDGRYSVDYSKFGNTIKVPTPLCTARQLDEDRS

SEQ ID NO: 69 - DNA, 2403 bp, Artificial sequence
  hybrid sequence
  CDS (1)..(2403)
atggatccactgaatctgtcctggtatgatgatgatctggagaggcagaactggagccggcccttcaacgggtcagacgggaaggcggacagaccccactacaactactatgccacactgctcaccctgctcatcgctgtcatcgtcttcggcaacgtgctggtgtgcatggctgtgtcccgcgagaaggcgctgcagaccaccaccaactacctgatcgtcagcctcgcagtggccgacctcctcgtcgccacactggtcatgccctgggttgtctacctggaggtggtaggtgagtggaaattcagcaggattcactgtgacatcttcgtcactctggacgtcatgatgtgcacggcgagcatcctgaacttgtgtgccatcagcatcgacaggtacacagctgtggccatgcccatgctgtacaatacgcgctacagctccaagcgccgggtcaccgtcatgatctccatcgtctgggtcctgtccttcaccatctcctgcccactcctcttcggactcaataacgcagaccagaacgagtgcatcattgccaacccggccttcgtggtctactcctccatcgtctccttctacgtgcccttcattgtcaccctgctggtctacatcaagatctacattgtcctccgcagacgccgcaagcgagtcaacaccaaacgcagcagccgagctttcagggcccacctgagggctccactaaagggcaactgtactcaccccgaggacatgaaactctgcaccgttatcatgaagtctaatgggagtttcccagtgaacaggcggagagtggaggctgcccggcgagcccaggagctggagatggagatgctctccagcaccagcccacccgagaggacccggtacagccccatcccacccagccaccaccagctgactctccccgacccgtcccaccatggtctccacagcactcccgacagccccgccaaaccagagaagaatgggcatgccaaagaccaccccaagattgccaagatctttgagatccagaccatgcccaatggcaaaacccggacctccctcaagaccatgagccgtaggaagctctcccagcagaaggagaagaaagccactcagatgctcgccattgttctcggcgtgttcatcatctgctggctgcccttcttcatcacacacatcctgaacatacactgtgactgcaacatcccgcctgtcctgtacagcgccttcacgtggctgggctatgtcaacagcgccgtgaaccccatcatctacaccaccttcaacattgagttccgcaaggccttcctgaagatcctccactgcctggcagaggaccctgcagagcccaggtaccgtactcgagagaggagggcccgcttcgtgtccaagaaaggcaactgcaacgtcgcccacaagaacattcgagagcagggccgcttcctgcaggatgtgttcaccacgctggtggacctcaaatggccacacactctgctcattttcaccatgtccttcctgtgcagctggctgctctttgccatggtctggtggctcatcgccttcgcccacggtgatctctatgcttacatggagaaaggcatcacggacctggccccctacccatacgatgtaccagattacgccggagagggcaccaatgtgccctgcgtcacaagcatccactccttttcatctgccttccttttctccatcgaggtccaggtgaccattggtttcggcgggcgcatggtgacagaggaatgtcccctggccatcctcattctcattgtgcagaatatcgtcgggctgatgatcaacgccatcatgctgggctgcatcttcatgaaaacggcccaggcacatcggcgggcagaaaccctcatcttcagcaagcatgctgtgatcaccctgcgccatggccgcctgtgcttcatgctgcgcgtaggggacctccgaaagagcatgatcattagcgccaccatccacatgcaggtggtgcgcaagaccaccagccccgagggcgaagttgtgcctctccaccaggtagacatccccatggagaatggcgtgggtggtaacggcatcttcctggtggccccactcatcatctaccacgtcatcgactccaacagcccgctctacgacctggctcctagtgacctgcaccaccaccaggacctggagatcattgtcatcttggaaggcgtggtagaaaccacgggcatcaccacccaggcccgcacctcctacctagctgacgagattctatgggggcagcgctttgtccccattgtggccgaggaggacggccgctattctgtggactactccaaatttggtaacaccattaaagtgcccacaccactctgcacagcccgccagcttgatgaggaccgcagt

SEQ ID NO: 70 - protein, 801 aa, Artificial sequence
  Synthetic Construct
MDPLNLSWYDDDLERQNWSRPFNGSDGKADRPHYNYYATLLTLLIAVIVFGNVLVCMAVSREKALQTTTNYLIVSLAVADLLVATLVMPWVVYLEVVGEWKFSRIHCDIFVTLDVMMCTASILNLCAISIDRYTAVAMPMLYNTRYSSKRRVTVMISIVWVLSFTISCPLLFGLNNADQNECIIANPAFVVYSSIVSFYVPFIVTLLVYIKIYIVLRRRRKRVNTKRSSRAFRAHLRAPLKGNCTHPEDMKLCTVIMKSNGSFPVNRRRVEAARRAQELEMEMLSSTSPPERTRYSPIPPSHHQLTLPDPSHHGLHSTPDSPAKPEKNGHAKDHPKIAKIFEIQTMPNGKTRTSLKTMSRRKLSQQKEKKATQMLAIVLGVFIICWLPFFITHILNIHCDCNIPPVLYSAFTWLGYVNSAVNPIIYTTFNIEFRKAFLKILHCLAEDPAEPRYRTRERRARFVSKKGNCNVAHKNIREQGRFLQDVFTTLVDLKWPHTLLIFTMSFLCSWLLFAMVWWLIAFAHGDLYAYMEKGITDLAPYPYDVPDYAGEGTNVPCVTSIHSFSSAFLFSIEVQVTIGFGGRMVTEECPLAILILIVQNIVGLMINAIMLGCIFMKTAQAHRRAETLIFSKHAVITLRHGRLCFMLRVGDLRKSMIISATIHMQVVRKTTSPEGEVVPLHQVDIPMENGVGGNGIFLVAPLIIYHVIDSNSPLYDLAPSDLHHHQDLEIIVILEGVVETTGITTQARTSYLADEILWGQRFVPIVAEEDGRYSVDYSKFGNTIKVPTPLCTARQLDEDRS

SEQ ID NO: 71 - DNA, 2511 bp, Artificial sequence
  hybrid sequence
  CDS (1)..(2511)
atggatccactgaatctgtcctggtatgatgatgatctggagaggcagaactggagccggcccttcaacgggtcagacgggaaggcggacagaccccactacaactactatgccacactgctcaccctgctcatcgctgtcatcgtcttcggcaacgtgctggtgtgcatggctgtgtcccgcgagaaggcgctgcagaccaccaccaactacctgatcgtcagcctcgcagtggccgacctcctcgtcgccacactggtcatgccctgggttgtctacctggaggtggtaggtgagtggaaattcagcaggattcactgtgacatcttcgtcactctggacgtcatgatgtgcacggcgagcatcctgaacttgtgtgccatcagcatcgacaggtacacagctgtggccatgcccatgctgtacaatacgcgctacagctccaagcgccgggtcaccgtcatgatctccatcgtctgggtcctgtccttcaccatctcctgcccactcctcttcggactcaataacgcagaccagaacgagtgcatcattgccaacccggccttcgtggtctactcctccatcgtctccttctacgtgcccttcattgtcaccctgctggtctacatcaagatctacattgtcctccgcagacgccgcaagcgagtcaacaccaaacgcagcagccgagctttcagggcccacctgagggctccactaaagggcaactgtactcaccccgaggacatgaaactctgcaccgttatcatgaagtctaatgggagtttcccagtgaacaggcggagagtggaggctgcccggcgagcccaggagctggagatggagatgctctccagcaccagcccacccgagaggacccggtacagccccatcccacccagccaccaccagctgactctccccgacccgtcccaccatggtctccacagcactcccgacagccccgccaaaccagagaagaatgggcatgccaaagaccaccccaagattgccaagatctttgagatccagaccatgcccaatggcaaaacccggacctccctcaagaccatgagccgtaggaagctctcccagcagaaggagaagaaagccactcagatgctcgccattgttctcggcgtgttcatcatctgctggctgcccttcttcatcacacacatcctgaacatacactgtgactgcaacatcccgcctgtcctgtacagcgccttcacgtggctgggctatgtcaacagcgccgtgaaccccatcatctacaccaccttcaacattgagttccgcaaggccttcctgaagatcctccactgcctggcagaggaccctgcagagcccaggtaccgtactcgagagaggagggcccgcttcgtgtccaagaaaggcaactgcaacgtcgcccacaagaacattcgagagcagggccgcttcctgcaggatgtgttcaccacgctggtggacctcaaatggccacacactctgctcattttcaccatgtccttcctgtgcagctggctgctctttgccatggtctggtggctcatcgccttcgcccacggtgatctctatgcttacatggagaaaggcatcacggacctggccccctacccatacgatgtaccagattacgccggagagggcaccaatgtgccctgcgtcacaagcatccactccttttcatctgccttccttttctccatcgaggtccaggtgaccattggtttcggcgggcgcatggtgacagaggaatgtcccctggccatcctcattctcattgtgcagaatatcgtcgggctgatgatcaacgccatcatgctgggctgcatcttcatgaaaacggcccaggcacatcggcgggcagaaaccctcatcttcagcaagcatgctgtgatcaccctgcgccatggccgcctgtgcttcatgctgcgcgtaggggacctccgaaagagcatgatcattagcgccaccatccacatgcaggtggtgcgcaagaccaccagccccgagggcgaagttgtgcctctccaccaggtagacatccccatggagaatggcgtgggtggtaacggcatcttcctggtggccccactcatcatctaccacgtcatcgactccaacagcccgctctacgacctggctcctagtgacctgcaccaccaccaggacctggagatcattgtcatcttggaaggcgtggtagaaaccacgggcatcaccacccaggcccgcacctcctacctagctgacgagattctatgggggcagcgctttgtccccattgtggccgaggaggacggccgctattctgtggactactccaaatttggtaacaccattaaagtgcccacaccactctgcacagcccgccagcttgatgaggaccgcagtctgctggatgccctgaccctcgcctcgtcgcgggggcccctgcgcaagcgcagtgtggctgtggcgaaggccaagcccaagtttagcatctctccagattccttgtcc

SEQ ID NO: 72 - protein, 837 aa, Artificial sequence
  Synthetic Construct
MDPLNLSWYDDDLERQNWSRPFNGSDGKADRPHYNYYATLLTLLIAVIVFGNVLVCMAVSREKALQTTTNYLIVSLAVADLLVATLVMPWVVYLEVVGEWKFSRIHCDIFVTLDVMMCTASILNLCAISIDRYTAVAMPMLYNTRYSSKRRVTVMISIVWVLSFTISCPLLFGLNNADQNECIIANPAFVVYSSIVSFYVPFIVTLLVYIKIYIVLRRRRKRVNTKRSSRAFRAHLRAPLKGNCTHPEDMKLCTVIMKSNGSFPVNRRRVEAARRAQELEMEMLSSTSPPERTRYSPIPPSHHQLTLPDPSHHGLHSTPDSPAKPEKNGHAKDHPKIAKIFEIQTMPNGKTRTSLKTMSRRKLSQQKEKKATQMLAIVLGVFIICWLPFFITHILNIHCDCNIPPVLYSAFTWLGYVNSAVNPIIYTTFNIEFRKAFLKILHCLAEDPAEPRYRTRERRARFVSKKGNCNVAHKNIREQGRFLQDVFTTLVDLKWPHTLLIFTMSFLCSWLLFAMVWWLIAFAHGDLYAYMEKGITDLAPYPYDVPDYAGEGTNVPCVTSIHSFSSAFLFSIEVQVTIGFGGRMVTEECPLAILILIVQNIVGLMINAIMLGCIFMKTAQAHRRAETLIFSKHAVITLRHGRLCFMLRVGDLRKSMIISATIHMQVVRKTTSPEGEVVPLHQVDIPMENGVGGNGIFLVAPLIIYHVIDSNSPLYDLAPSDLHHHQDLEIIVILEGVVETTGITTQARTSYLADEILWGQRFVPIVAEEDGRYSVDYSKFGNTIKVPTPLCTARQLDEDRSLLDALTLASSRGPLRKRSVAVAKAKPKFSISPDSLS

SEQ ID NO: 73 - DNA, 2451 bp, Artificial sequence
  hybrid sequence
  CDS (1)..(2451)
atggatccactgaatctgtcctggtatgatgatgatctggagaggcagaactggagccggcccttcaacgggtcagacgggaaggcggacagaccccactacaactactatgccacactgctcaccctgctcatcgctgtcatcgtcttcggcaacgtgctggtgtgcatggctgtgtcccgcgagaaggcgctgcagaccaccaccaactacctgatcgtcagcctcgcagtggccgacctcctcgtcgccacactggtcatgccctgggttgtctacctggaggtggtaggtgagtggaaattcagcaggattcactgtgacatcttcgtcactctggacgtcatgatgtgcacggcgagcatcctgaacttgtgtgccatcagcatcgacaggtacacagctgtggccatgcccatgctgtacaatacgcgctacagctccaagcgccgggtcaccgtcatgatctccatcgtctgggtcctgtccttcaccatctcctgcccactcctcttcggactcaataacgcagaccagaacgagtgcatcattgccaacccggccttcgtggtctactcctccatcgtctccttctacgtgcccttcattgtcaccctgctggtctacatcaagatctacattgtcctccgcagacgccgcaagcgagtcaacaccaaacgcagcagccgagctttcagggcccacctgagggctccactaaagggcaactgtactcaccccgaggacatgaaactctgcaccgttatcatgaagtctaatgggagtttcccagtgaacaggcggagagtggaggctgcccggcgagcccaggagctggagatggagatgctctccagcaccagcccacccgagaggacccggtacagccccatcccacccagccaccaccagctgactctccccgacccgtcccaccatggtctccacagcactcccgacagccccgccaaaccagagaagaatgggcatgccaaagaccaccccaagattgccaagatctttgagatccagaccatgcccaatggcaaaacccggacctccctcaagaccatgagccgtaggaagctctcccagcagaaggagaagaaagccactcagatgctcgccattgttctcggcgtgttcatcatctgctggctgcccttcttcatcacacacatcctgaacatacactgtgactgcaacatcccgcctgtcctgtacagcgccttcacgtggctgggctatgtcaacagcgccgtgaaccccatcatctacaccaccttcaacattgagttccgcaaggccttcctgaagatcctccactgcctggcagaggaccctgcagagcccaggtaccgtactcgagagaggagggcccgcttcgtgtccaagaaaggcaactgcaacgtcgcccacaagaacattcgagagcagggccgcttcctgcaggatgtgttcaccacgctggtggacctcaaatggccacacactctgctcattttcaccatgtccttcctgtgcagctggctgctctttgccatggtctggtggctcatcgccttcgcccacggtgacctggcccccggagagggcaccaatgtgccctgcgtcacaagcatccactccttttcatctgccttccttttctccatcgaggtccaggtgaccattggtttcggcgggcgcatggtgacagaggaatgtcccctggccatcctcattctcattgtgcagaatatcgtcgggctgatgatcaacgccatcatgctgggctgcatcttcatgaaaacggcccaggcacatcggcgggcagaaaccctcatcttcagcaagcatgctgtgatcaccctgcgccatggccgcctgtgcttcatgctgcgcgtaggggacctccgaaagagcatgatcattagcgccaccatccacatgcaggtggtgcgcaagaccaccagccccgagggcgaagttgtgcctctccaccaggtagacatccccatggagaatggcgtgggtggtaacggcatcttcctggtggccccactcatcatctaccacgtcatcgactccaacagcccgctctacgacctggctcctagtgacctgcaccaccaccaggacctggagatcattgtcatcttggaaggcgtggtagaaaccacgggcatcaccacccaggcccgcacctcctacctagctgacgagattctatgggggcagcgctttgtccccattgtggccgaggaggacggccgctattctgtggactactccaaatttggtaacaccattaaagtgcccacaccactctgcacagcccgccagcttgatgaggaccgcagtctgctggatgccctgaccctcgcctcgtcgcgggggcccctgcgcaagcgcagtgtggctgtggcgaaggccaagcccaagtttagcatctctccagattccttgtcc

SEQ ID NO: 74 - protein, 817 aa, Artificial sequence
  Synthetic Construct
MDPLNLSWYDDDLERQNWSRPFNGSDGKADRPHYNYYATLLTLLIAVIVFGNVLVCMAVSREKALQTTTNYLIVSLAVADLLVATLVMPWVVYLEVVGEWKFSRIHCDIFVTLDVMMCTASILNLCAISIDRYTAVAMPMLYNTRYSSKRRVTVMISIVWVLSFTISCPLLFGLNNADQNECIIANPAFVVYSSIVSFYVPFIVTLLVYIKIYIVLRRRRKRVNTKRSSRAFRAHLRAPLKGNCTHPEDMKLCTVIMKSNGSFPVNRRRVEAARRAQELEMEMLSSTSPPERTRYSPIPPSHHQLTLPDPSHHGLHSTPDSPAKPEKNGHAKDHPKIAKIFEIQTMPNGKTRTSLKTMSRRKLSQQKEKKATQMLAIVLGVFIICWLPFFITHILNIHCDCNIPPVLYSAFTWLGYVNSAVNPIIYTTFNIEFRKAFLKILHCLAEDPAEPRYRTRERRARFVSKKGNCNVAHKNIREQGRFLQDVFTTLVDLKWPHTLLIFTMSFLCSWLLFAMVWWLIAFAHGDLAPGEGTNVPCVTSIHSFSSAFLFSIEVQVTIGFGGRMVTEECPLAILILIVQNIVGLMINAIMLGCIFMKTAQAHRRAETLIFSKHAVITLRHGRLCFMLRVGDLRKSMIISATIHMQVVRKTTSPEGEVVPLHQVDIPMENGVGGNGIFLVAPLIIYHVIDSNSPLYDLAPSDLHHHQDLEIIVILEGVVETTGITTQARTSYLADEILWGQRFVPIVAEEDGRYSVDYSKFGNTIKVPTPLCTARQLDEDRSLLDALTLASSRGPLRKRSVAVAKAKPKFSISPDSLS

SEQ ID NO: 75 - DNA, 2343 bp, Artificial sequence
  hybrid sequence
  CDS (1)..(2343)
atggatccactgaatctgtcctggtatgatgatgatctggagaggcagaactggagccggcccttcaacgggtcagacgggaaggcggacagaccccactacaactactatgccacactgctcaccctgctcatcgctgtcatcgtcttcggcaacgtgctggtgtgcatggctgtgtcccgcgagaaggcgctgcagaccaccaccaactacctgatcgtcagcctcgcagtggccgacctcctcgtcgccacactggtcatgccctgggttgtctacctggaggtggtaggtgagtggaaattcagcaggattcactgtgacatcttcgtcactctggacgtcatgatgtgcacggcgagcatcctgaacttgtgtgccatcagcatcgacaggtacacagctgtggccatgcccatgctgtacaatacgcgctacagctccaagcgccgggtcaccgtcatgatctccatcgtctgggtcctgtccttcaccatctcctgcccactcctcttcggactcaataacgcagaccagaacgagtgcatcattgccaacccggccttcgtggtctactcctccatcgtctccttctacgtgcccttcattgtcaccctgctggtctacatcaagatctacattgtcctccgcagacgccgcaagcgagtcaacaccaaacgcagcagccgagctttcagggcccacctgagggctccactaaagggcaactgtactcaccccgaggacatgaaactctgcaccgttatcatgaagtctaatgggagtttcccagtgaacaggcggagagtggaggctgcccggcgagcccaggagctggagatggagatgctctccagcaccagcccacccgagaggacccggtacagccccatcccacccagccaccaccagctgactctccccgacccgtcccaccatggtctccacagcactcccgacagccccgccaaaccagagaagaatgggcatgccaaagaccaccccaagattgccaagatctttgagatccagaccatgcccaatggcaaaacccggacctccctcaagaccatgagccgtaggaagctctcccagcagaaggagaagaaagccactcagatgctcgccattgttctcggcgtgttcatcatctgctggctgcccttcttcatcacacacatcctgaacatacactgtgactgcaacatcccgcctgtcctgtacagcgccttcacgtggctgggctatgtcaacagcgccgtgaaccccatcatctacaccaccttcaacattgagttccgcaaggccttcctgaagatcctccactgcctggcagaggaccctgcagagcccaggtaccgtactcgagagaggagggcccgcttcgtgtccaagaaaggcaactgcaacgtcgcccacaagaacattcgagagcagggccgcttcctgcaggatgtgttcaccacgctggtggacctcaaatggccacacactctgctcattttcaccatgtccttcctgtgcagctggctgctctttgccatggtctggtggctcatcgccttcgcccacggtgacctggcccccggagagggcaccaatgtgccctgcgtcacaagcatccactccttttcatctgccttccttttctccatcgaggtccaggtgaccattggtttcggcgggcgcatggtgacagaggaatgtcccctggccatcctcattctcattgtgcagaatatcgtcgggctgatgatcaacgccatcatgctgggctgcatcttcatgaaaacggcccaggcacatcggcgggcagaaaccctcatcttcagcaagcatgctgtgatcaccctgcgccatggccgcctgtgcttcatgctgcgcgtaggggacctccgaaagagcatgatcattagcgccaccatccacatgcaggtggtgcgcaagaccaccagccccgagggcgaagttgtgcctctccaccaggtagacatccccatggagaatggcgtgggtggtaacggcatcttcctggtggccccactcatcatctaccacgtcatcgactccaacagcccgctctacgacctggctcctagtgacctgcaccaccaccaggacctggagatcattgtcatcttggaaggcgtggtagaaaccacgggcatcaccacccaggcccgcacctcctacctagctgacgagattctatgggggcagcgctttgtccccattgtggccgaggaggacggccgctattctgtggactactccaaatttggtaacaccattaaagtgcccacaccactctgcacagcccgccagcttgatgaggaccgcagt

SEQ ID NO: 76 - protein, 781 aa, Artificial sequence
  Synthetic Construct
MDPLNLSWYDDDLERQNWSRPFNGSDGKADRPHYNYYATLLTLLIAVIVFGNVLVCMAVSREKALQTTTNYLIVSLAVADLLVATLVMPWVVYLEVVGEWKFSRIHCDIFVTLDVMMCTASILNLCAISIDRYTAVAMPMLYNTRYSSKRRVTVMISIVWVLSFTISCPLLFGLNNADQNECIIANPAFVVYSSIVSFYVPFIVTLLVYIKIYIVLRRRRKRVNTKRSSRAFRAHLRAPLKGNCTHPEDMKLCTVIMKSNGSFPVNRRRVEAARRAQELEMEMLSSTSPPERTRYSPIPPSHHQLTLPDPSHHGLHSTPDSPAKPEKNGHAKDHPKIAKIFEIQTMPNGKTRTSLKTMSRRKLSQQKEKKATQMLAIVLGVFIICWLPFFITHILNIHCDCNIPPVLYSAFTWLGYVNSAVNPIIYTTFNIEFRKAFLKILHCLAEDPAEPRYRTRERRARFVSKKGNCNVAHKNIREQGRFLQDVFTTLVDLKWPHTLLIFTMSFLCSWLLFAMVWWLIAFAHGDLAPGEGTNVPCVTSIHSFSSAFLFSIEVQVTIGFGGRMVTEECPLAILILIVQNIVGLMINAIMLGCIFMKTAQAHRRAETLIFSKHAVITLRHGRLCFMLRVGDLRKSMIISATIHMQVVRKTTSPEGEVVPLHQVDIPMENGVGGNGIFLVAPLIIYHVIDSNSPLYDLAPSDLHHHQDLEIIVILEGVVETTGITTQARTSYLADEILWGQRFVPIVAEEDGRYSVDYSKFGNTIKVPTPLCTARQLDEDRS

SEQ ID NO: 77 - DNA, 2403 bp, Artificial sequence
  hybrid sequence
  CDS (1)..(2403)
atggatccactgaatctgtcctggtatgatgatgatctggagaggcagaactggagccggcccttcaacgggtcagacgggaaggcggacagaccccactacaactactatgccacactgctcaccctgctcatcgctgtcatcgtcttcggcaacgtgctggtgtgcatggctgtgtcccgcgagaaggcgctgcagaccaccaccaactacctgatcgtcagcctcgcagtggccgacctcctcgtcgccacactggtcatgccctgggttgtctacctggaggtggtaggtgagtggaaattcagcaggattcactgtgacatcttcgtcactctggacgtcatgatgtgcacggcgagcatcctgaacttgtgtgccatcagcatcgacaggtacacagctgtggccatgcccatgctgtacaatacgcgctacagctccaagcgccgggtcaccgtcatgatctccatcgtctgggtcctgtccttcaccatctcctgcccactcctcttcggactcaataacgcagaccagaacgagtgcatcattgccaacccggccttcgtggtctactcctccatcgtctccttctacgtgcccttcattgtcaccctgctggtctacatcaagatctacattgtcctccgcagacgccgcaagcgagtcaacaccaaacgcagcagccgagctttcagggcccacctgagggctccactaaagggcaactgtactcaccccgaggacatgaaactctgcaccgttatcatgaagtctaatgggagtttcccagtgaacaggcggagagtggaggctgcccggcgagcccaggagctggagatggagatgctctccagcaccagcccacccgagaggacccggtacagccccatcccacccagccaccaccagctgactctccccgacccgtcccaccatggtctccacagcactcccgacagccccgccaaaccagagaagaatgggcatgccaaagaccaccccaagattgccaagatctttgagatccagaccatgcccaatggcaaaacccggacctccctcaagaccatgagccgtaggaagctctcccagcagaaggagaagaaagccactcagatgctcgccattgttctcggcgtgttcatcatctgctggctgcccttcttcatcacacacatcctgaacatacactgtgactgcaacatcccgcctgtcctgtacagcgccttcacgtggctgggctatgtcaacagcgccgtgaaccccatcatctacaccaccttcaacattgagttccgcaaggccttcctgaagatcctccactgccattataagaacataggcgctacaaggtaccgtactcgagagaggagggcccgcttcgtgtccaagaaaggcaactgcaacgtcgcccacaagaacattcgagagcagggccgcttcctgcaggatgtgttcaccacgctggtggacctcaaatggccacacactctgctcattttcaccatgtccttcctgtgcagctggctgctctttgccatggtctggtggctcatcgccttcgcccacggtgatctctatgcttacatggagaaaggcatcacggacctggccccctacccatacgatgtaccagattacgccggagagggcaccaatgtgccctgcgtcacaagcatccactccttttcatctgccttccttttctccatcgaggtccaggtgaccattggtttcggcgggcgcatggtgacagaggaatgtcccctggccatcctcattctcattgtgcagaatatcgtcgggctgatgatcaacgccatcatgctgggctgcatcttcatgaaaacggcccaggcacatcggcgggcagaaaccctcatcttcagcaagcatgctgtgatcaccctgcgccatggccgcctgtgcttcatgctgcgcgtaggggacctccgaaagagcatgatcattagcgccaccatccacatgcaggtggtgcgcaagaccaccagccccgagggcgaagttgtgcctctccaccaggtagacatccccatggagaatggcgtgggtggtaacggcatcttcctggtggccccactcatcatctaccacgtcatcgactccaacagcccgctctacgacctggctcctagtgacctgcaccaccaccaggacctggagatcattgtcatcttggaaggcgtggtagaaaccacgggcatcaccacccaggcccgcacctcctacctagctgacgagattctatgggggcagcgctttgtccccattgtggccgaggaggacggccgctattctgtggactactccaaatttggtaacaccattaaagtgcccacaccactctgcacagcccgccagcttgatgaggaccgcagt

SEQ ID NO: 78 - protein, 801 aa, Artificial sequence
  Synthetic Construct
MDPLNLSWYDDDLERQNWSRPFNGSDGKADRPHYNYYATLLTLLIAVIVFGNVLVCMAVSREKALQTTTNYLIVSLAVADLLVATLVMPWVVYLEVVGEWKFSRIHCDIFVTLDVMMCTASILNLCAISIDRYTAVAMPMLYNTRYSSKRRVTVMISIVWVLSFTISCPLLFGLNNADQNECIIANPAFVVYSSIVSFYVPFIVTLLVYIKIYIVLRRRRKRVNTKRSSRAFRAHLRAPLKGNCTHPEDMKLCTVIMKSNGSFPVNRRRVEAARRAQELEMEMLSSTSPPERTRYSPIPPSHHQLTLPDPSHHGLHSTPDSPAKPEKNGHAKDHPKIAKIFEIQTMPNGKTRTSLKTMSRRKLSQQKEKKATQMLAIVLGVFIICWLPFFITHILNIHCDCNIPPVLYSAFTWLGYVNSAVNPIIYTTFNIEFRKAFLKILHCHYKNIGATRYRTRERRARFVSKKGNCNVAHKNIREQGRFLQDVFTTLVDLKWPHTLLIFTMSFLCSWLLFAMVWWLIAFAHGDLYAYMEKGITDLAPYPYDVPDYAGEGTNVPCVTSIHSFSSAFLFSIEVQVTIGFGGRMVTEECPLAILILIVQNIVGLMINAIMLGCIFMKTAQAHRRAETLIFSKHAVITLRHGRLCFMLRVGDLRKSMIISATIHMQVVRKTTSPEGEVVPLHQVDIPMENGVGGNGIFLVAPLIIYHVIDSNSPLYDLAPSDLHHHQDLEIIVILEGVVETTGITTQARTSYLADEILWGQRFVPIVAEEDGRYSVDYSKFGNTIKVPTPLCTARQLDEDRS

SEQ ID NO: 79 - DNA, 2511 bp, Artificial sequence
  hybrid sequence
  CDS (1)..(2511)
atggatccactgaatctgtcctggtatgatgatgatctggagaggcagaactggagccggcccttcaacgggtcagacgggaaggcggacagaccccactacaactactatgccacactgctcaccctgctcatcgctgtcatcgtcttcggcaacgtgctggtgtgcatggctgtgtcccgcgagaaggcgctgcagaccaccaccaactacctgatcgtcagcctcgcagtggccgacctcctcgtcgccacactggtcatgccctgggttgtctacctggaggtggtaggtgagtggaaattcagcaggattcactgtgacatcttcgtcactctggacgtcatgatgtgcacggcgagcatcctgaacttgtgtgccatcagcatcgacaggtacacagctgtggccatgcccatgctgtacaatacgcgctacagctccaagcgccgggtcaccgtcatgatctccatcgtctgggtcctgtccttcaccatctcctgcccactcctcttcggactcaataacgcagaccagaacgagtgcatcattgccaacccggccttcgtggtctactcctccatcgtctccttctacgtgcccttcattgtcaccctgctggtctacatcaagatctacattgtcctccgcagacgccgcaagcgagtcaacaccaaacgcagcagccgagctttcagggcccacctgagggctccactaaagggcaactgtactcaccccgaggacatgaaactctgcaccgttatcatgaagtctaatgggagtttcccagtgaacaggcggagagtggaggctgcccggcgagcccaggagctggagatggagatgctctccagcaccagcccacccgagaggacccggtacagccccatcccacccagccaccaccagctgactctccccgacccgtcccaccatggtctccacagcactcccgacagccccgccaaaccagagaagaatgggcatgccaaagaccaccccaagattgccaagatctttgagatccagaccatgcccaatggcaaaacccggacctccctcaagaccatgagccgtaggaagctctcccagcagaaggagaagaaagccactcagatgctcgccattgttctcggcgtgttcatcatctgctggctgcccttcttcatcacacacatcctgaacatacactgtgactgcaacatcccgcctgtcctgtacagcgccttcacgtggctgggctatgtcaacagcgccgtgaaccccatcatctacaccaccttcaacattgagttccgcaaggccttcctgaagatcctccactgccattataagaacataggcgctacaaggtaccgtactcgagagaggagggcccgcttcgtgtccaagaaaggcaactgcaacgtcgcccacaagaacattcgagagcagggccgcttcctgcaggatgtgttcaccacgctggtggacctcaaatggccacacactctgctcattttcaccatgtccttcctgtgcagctggctgctctttgccatggtctggtggctcatcgccttcgcccacggtgatctctatgcttacatggagaaaggcatcacggacctggccccctacccatacgatgtaccagattacgccggagagggcaccaatgtgccctgcgtcacaagcatccactccttttcatctgccttccttttctccatcgaggtccaggtgaccattggtttcggcgggcgcatggtgacagaggaatgtcccctggccatcctcattctcattgtgcagaatatcgtcgggctgatgatcaacgccatcatgctgggctgcatcttcatgaaaacggcccaggcacatcggcgggcagaaaccctcatcttcagcaagcatgctgtgatcaccctgcgccatggccgcctgtgcttcatgctgcgcgtaggggacctccgaaagagcatgatcattagcgccaccatccacatgcaggtggtgcgcaagaccaccagccccgagggcgaagttgtgcctctccaccaggtagacatccccatggagaatggcgtgggtggtaacggcatcttcctggtggccccactcatcatctaccacgtcatcgactccaacagcccgctctacgacctggctcctagtgacctgcaccaccaccaggacctggagatcattgtcatcttggaaggcgtggtagaaaccacgggcatcaccacccaggcccgcacctcctacctagctgacgagattctatgggggcagcgctttgtccccattgtggccgaggaggacggccgctattctgtggactactccaaatttggtaacaccattaaagtgcccacaccactctgcacagcccgccagcttgatgaggaccgcagtctgctggatgccctgaccctcgcctcgtcgcgggggcccctgcgcaagcgcagtgtggctgtggcgaaggccaagcccaagtttagcatctctccagattccttgtcc

SEQ ID NO: 80 - protein, 837 aa, Artificial sequence [sequence omitted]

SEQ ID NO: 81 - DNA, 2451 bp, Artificial sequence
  hybrid sequence
  CDS (1)..(2451)
atggatccactgaatctgtcctggtatgatgatgatctggagaggcagaactggagccggcccttcaacgggtcagacgggaaggcggacagaccccactacaactactatgccacactgctcaccctgctcatcgctgtcatcgtcttcggcaacgtgctggtgtgcatggctgtgtcccgcgagaaggcgctgcagaccaccaccaactacctgatcgtcagcctcgcagtggccgacctcctcgtcgccacactggtcatgccctgggttgtctacctggaggtggtaggtgagtggaaattcagcaggattcactgtgacatcttcgtcactctggacgtcatgatgtgcacggcgagcatcctgaacttgtgtgccatcagcatcgacaggtacacagctgtggccatgcccatgctgtacaatacgcgctacagctccaagcgccgggtcaccgtcatgatctccatcgtctgggtcctgtccttcaccatctcctgcccactcctcttcggactcaataacgcagaccagaacgagtgcatcattgccaacccggccttcgtggtctactcctccatcgtctccttctacgtgcccttcattgtcaccctgctggtctacatcaagatctacattgtcctccgcagacgccgcaagcgagtcaacaccaaacgcagcagccgagctttcagggcccacctgagggctccactaaagggcaactgtactcaccccgaggacatgaaactctgcaccgttatcatgaagtctaatgggagtttcccagtgaacaggcggagagtggaggctgcccggcgagcccaggagctggagatggagatgctctccagcaccagcccacccgagaggacccggtacagccccatcccacccagccaccaccagctgactctccccgacccgtcccaccatggtctccacagcactcccgacagccccgccaaaccagagaagaatgggcatgccaaagaccaccccaagattgccaagatctttgagatccagaccatgcccaatggcaaaacccggacctccctcaagaccatgagccgtaggaagctctcccagcagaaggagaagaaagccactcagatgctcgccattgttctcggcgtgttcatcatctgctggctgcccttcttcatcacacacatcctgaacatacactgtgactgcaacatcccgcctgtcctgtacagcgccttcacgtggctgggctatgtcaacagcgccgtgaaccccatcatctacaccaccttcaacattgagttccgcaaggccttcctgaagatcctccactgccattataagaacataggcgctacaaggtaccgtactcgagagaggagggcccgcttcgtgtccaagaaaggcaactgcaacgtcgcccacaagaacattcgagagcagggccgcttcctgcaggatgtgttcaccacgctggtggacctcaaatggccacacactctgctcattttcaccatgtccttcctgtgcagctggctgctctttgccatggtctggtggctcatcgccttcgcccacggtgacctggcccccggagagggcaccaatgtgccctgcgtcacaagcatccactccttttcatctgccttccttttctccatcgaggtccaggtgaccattggtttcggcgggcgcatggtgacagaggaatgtcccctggccatcctcattctcattgtgcagaatatcgtcgggctgatgatcaacgccatcatgctgggctgcatcttcatgaaaacggcccaggcacatcggcgggcagaaaccctcatcttcagcaagcatgctgtgatcaccctgcgccatggccgcctgtgcttcatgctgcgcgtaggggacctccgaaagagcatgatcattagcgccaccatccacatgcaggtggtgcgcaagaccaccagccccgagggcgaagttgtgcctctccaccaggtagacatccccatggagaatggcgtgggtggtaacggcatcttcctggtggccccactcatcatctaccacgtcatcgactccaacagcccgctctacgacctggctcctagtgacctgcaccaccaccaggacctggagatcattgtcatcttggaaggcgtggtagaaaccacgggcatcaccacccaggcccgcacctcctacctagctgacgagattctatgggggcagcgctttgtccccattgtggccgaggaggacggccgctattctgtggactactccaaatttggtaacaccattaaagtgcccacaccactctgcacagcccgccagcttgatgaggaccgcagtctgctggatgccctgaccctcgcctcgtcgcgggggcccctgcgcaagcgcagtgtggctgtggcgaaggccaagcccaagtttagcatctctccagattccttgtcc

SEQ ID NO: 82 - protein, 817 aa, Artificial sequence
  Synthetic Construct
MDPLNLSWYDDDLERQNWSRPFNGSDGKADRPHYNYYATLLTLLIAVIVFGNVLVCMAVSREKALQTTTNYLIVSLAVADLLVATLVMPWVVYLEVVGEWKFSRIHCDIFVTLDVMMCTASILNLCAISIDRYTAVAMPMLYNTRYSSKRRVTVMISIVWVLSFTISCPLLFGLNNADQNECIIANPAFVVYSSIVSFYVPFIVTLLVYIKIYIVLRRRRKRVNTKRSSRAFRAHLRAPLKGNCTHPEDMKLCTVIMKSNGSFPVNRRRVEAARRAQELEMEMLSSTSPPERTRYSPIPPSHHQLTLPDPSHHGLHSTPDSPAKPEKNGHAKDHPKIAKIFEIQTMPNGKTRTSLKTMSRRKLSQQKEKKATQMLAIVLGVFIICWLPFFITHILNIHCDCNIPPVLYSAFTWLGYVNSAVNPIIYTTFNIEFRKAFLKILHCHYKNIGATRYRTRERRARFVSKKGNCNVAHKNIREQGRFLQDVFTTLVDLKWPHTLLIFTMSFLCSWLLFAMVWWLIAFAHGDLAPGEGTNVPCVTSIHSFSSAFLFSIEVQVTIGFGGRMVTEECPLAILILIVQNIVGLMINAIMLGCIFMKTAQAHRRAETLIFSKHAVITLRHGRLCFMLRVGDLRKSMIISATIHMQVVRKTTSPEGEVVPLHQVDIPMENGVGGNGIFLVAPLIIYHVIDSNSPLYDLAPSDLHHHQDLEIIVILEGVVETTGITTQARTSYLADEILWGQRFVPIVAEEDGRYSVDYSKFGNTIKVPTPLCTARQLDEDRSLLDALTLASSRGPLRKRSVAVAKAKPKFSISPDSLS

SEQ ID NO: 83 - DNA, 2343 bp, Artificial sequence
  hybrid sequence
  CDS (1)..(2343)
atggatccactgaatctgtcctggtatgatgatgatctggagaggcagaactggagccggcccttcaacgggtcagacgggaaggcggacagaccccactacaactactatgccacactgctcaccctgctcatcgctgtcatcgtcttcggcaacgtgctggtgtgcatggctgtgtcccgcgagaaggcgctgcagaccaccaccaactacctgatcgtcagcctcgcagtggccgacctcctcgtcgccacactggtcatgccctgggttgtctacctggaggtggtaggtgagtggaaattcagcaggattcactgtgacatcttcgtcactctggacgtcatgatgtgcacggcgagcatcctgaacttgtgtgccatcagcatcgacaggtacacagctgtggccatgcccatgctgtacaatacgcgctacagctccaagcgccgggtcaccgtcatgatctccatcgtctgggtcctgtccttcaccatctcctgcccactcctcttcggactcaataacgcagaccagaacgagtgcatcattgccaacccggccttcgtggtctactcctccatcgtctccttctacgtgcccttcattgtcaccctgctggtctacatcaagatctacattgtcctccgcagacgccgcaagcgagtcaacaccaaacgcagcagccgagctttcagggcccacctgagggctccactaaagggcaactgtactcaccccgaggacatgaaactctgcaccgttatcatgaagtctaatgggagtttcccagtgaacaggcggagagtggaggctgcccggcgagcccaggagctggagatggagatgctctccagcaccagcccacccgagaggacccggtacagccccatcccacccagccaccaccagctgactctccccgacccgtcccaccatggtctccacagcactcccgacagccccgccaaaccagagaagaatgggcatgccaaagaccaccccaagattgccaagatctttgagatccagaccatgcccaatggcaaaacccggacctccctcaagaccatgagccgtaggaagctctcccagcagaaggagaagaaagccactcagatgctcgccattgttctcggcgtgttcatcatctgctggctgcccttcttcatcacacacatcctgaacatacactgtgactgcaacatcccgcctgtcctgtacagcgccttcacgtggctgggctatgtcaacagcgccgtgaaccccatcatctacaccaccttcaacattgagttccgcaaggccttcctgaagatcctccactgccattataagaacataggcgctacaaggtaccgtactcgagagaggagggcccgcttcgtgtccaagaaaggcaactgcaacgtcgcccacaagaacattcgagagcagggccgcttcctgcaggatgtgttcaccacgctggtggacctcaaatggccacacactctgctcattttcaccatgtccttcctgtgcagctggctgctctttgccatggtctggtggctcatcgccttcgcccacggtgacctggcccccggagagggcaccaatgtgccctgcgtcacaagcatccactccttttcatctgccttccttttctccatcgaggtccaggtgaccattggtttcggcgggcgcatggtgacagaggaatgtcccctggccatcctcattctcattgtgcagaatatcgtcgggctgatgatcaacgccatcatgctgggctgcatcttcatgaaaacggcccaggcacatcggcgggcagaaaccctcatcttcagcaagcatgctgtgatcaccctgcgccatggccgcctgtgcttcatgctgcgcgtaggggacctccgaaagagcatgatcattagcgccaccatccacatgcaggtggtgcgcaagaccaccagccccgagggcgaagttgtgcctctccaccaggtagacatccccatggagaatggcgtgggtggtaacggcatcttcctggtggccccactcatcatctaccacgtcatcgactccaacagcccgctctacgacctggctcctagtgacctgcaccaccaccaggacctggagatcattgtcatcttggaaggcgtggtagaaaccacgggcatcaccacccaggcccgcacctcctacctagctgacgagattctatgggggcagcgctttgtccccattgtggccgaggaggacggccgctattctgtggactactccaaatttggtaacaccattaaagtgcccacaccactctgcacagcccgccagcttgatgaggaccgcagt

SEQ ID NO: 84 - protein, 781 aa, Artificial sequence
  Synthetic Construct
MDPLNLSWYDDDLERQNWSRPFNGSDGKADRPHYNYYATLLTLLIAVIVFGNVLVCMAVSREKALQTTTNYLIVSLAVADLLVATLVMPWVVYLEVVGEWKFSRIHCDIFVTLDVMMCTASILNLCAISIDRYTAVAMPMLYNTRYSSKRRVTVMISIVWVLSFTISCPLLFGLNNADQNECIIANPAFVVYSSIVSFYVPFIVTLLVYIKIYIVLRRRRKRVNTKRSSRAFRAHLRAPLKGNCTHPEDMKLCTVIMKSNGSFPVNRRRVEAARRAQELEMEMLSSTSPPERTRYSPIPPSHHQLTLPDPSHHGLHSTPDSPAKPEKNGHAKDHPKIAKIFEIQTMPNGKTRTSLKTMSRRKLSQQKEKKATQMLAIVLGVFIICWLPFFITHILNIHCDCNIPPVLYSAFTWLGYVNSAVNPIIYTTFNIEFRKAFLKILHCHYKNIGATRYRTRERRARFVSKKGNCNVAHKNIREQGRFLQDVFTTLVDLKWPHTLLIFTMSFLCSWLLFAMVWWLIAFAHGDLAPGEGTNVPCVTSIHSFSSAFLFSIEVQVTIGFGGRMVTEECPLAILILIVQNIVGLMINAIMLGCIFMKTAQAHRRAETLIFSKHAVITLRHGRLCFMLRVGDLRKSMIISATIHMQVVRKTTSPEGEVVPLHQVDIPMENGVGGNGIFLVAPLIIYHVIDSNSPLYDLAPSDLHHHQDLEIIVILEGVVETTGITTQARTSYLADEILWGQRFVPIVAEEDGRYSVDYSKFGNTIKVPTPLCTARQLDEDRS

SEQ ID NO: 85 - DNA, 2361 bp, Artificial sequence
  hybrid sequence
  CDS (1)..(2361)
atggatccactgaatctgtcctggtatgatgatgatctggagaggcagaactggagccggcccttcaacgggtcagacgggaaggcggacagaccccactacaactactatgccacactgctcaccctgctcatcgctgtcatcgtcttcggcaacgtgctggtgtgcatggctgtgtcccgcgagaaggcgctgcagaccaccaccaactacctgatcgtcagcctcgcagtggccgacctcctcgtcgccacactggtcatgccctgggttgtctacctggaggtggtaggtgagtggaaattcagcaggattcactgtgacatcttcgtcactctggacgtcatgatgtgcacggcgagcatcctgaacttgtgtgccatcagcatcgacaggtacacagctgtggccatgcccatgctgtacaatacgcgctacagctccaagcgccgggtcaccgtcatgatctccatcgtctgggtcctgtccttcaccatctcctgcccactcctcttcggactcaataacgcagaccagaacgagtgcatcattgccaacccggccttcgtggtctactcctccatcgtctccttctacgtgcccttcattgtcaccctgctggtctacatcaagatctacattgtcctccgcagacgccgcaagcgagtcaacaccaaacgcagcagccgagctttcagggcccacctgagggctccactaaagggcaactgtactcaccccgaggacatgaaactctgcaccgttatcatgaagtctaatgggagtttcccagtgaacaggcggagagtggaggctgcccggcgagcccaggagctggagatggagatgctctccagcaccagcccacccgagaggacccggtacagccccatcccacccagccaccaccagctgactctccccgacccgtcccaccatggtctccacagcactcccgacagccccgccaaaccagagaagaatgggcatgccaaagaccaccccaagattgccaagatctttgagatccagaccatgcccaatggcaaaacccggacctccctcaagaccatgagccgtaggaagctctcccagcagaaggagaagaaagccactcagatgctcgccattgttctcggcgtgttcatcatctgctggctgcccttcttcatcacacacatcctgaacatacactgtgactgcaacatcccgcctgtcctgtacagcgccttcacgtggctgggctatgtcaacagcgccgtgaaccccatcatctacaccaccttcaacattgagttccgcaaggccttcctgaagatcctccactgcaggagggcccgcttcgtgtccaagaaaggcaactgcaacgtcgcccacaagaacattcgagagcagggccgcttcctgcaggatgtgttcaccacgctggtggacctcaaatggccacacactctgctcattttcaccatgtccttcctgtgcagctggctgctctttgccatggtctggtggctcatcgccttcgcccacggtgatctctatgcttacatggagaaaggcatcacggacctggccccctacccatacgatgtaccagattacgccggagagggcaccaatgtgccctgcgtcacaagcatccactccttttcatctgccttccttttctccatcgaggtccaggtgaccattggtttcggcgggcgcatggtgacagaggaatgtcccctggccatcctcattctcattgtgcagaatatcgtcgggctgatgatcaacgccatcatgctgggctgcatcttcatgaaaacggcccaggcacatcggcgggcagaaaccctcatcttcagcaagcatgctgtgatcaccctgcgccatggccgcctgtgcttcatgctgcgcgtaggggacctccgaaagagcatgatcattagcgccaccatccacatgcaggtggtgcgcaagaccaccagccccgagggcgaagttgtgcctctccaccaggtagacatccccatggagaatggcgtgggtggtaacggcatcttcctggtggccccactcatcatctaccacgtcatcgactccaacagcccgctctacgacctggctcctagtgacctgcaccaccaccaggacctggagatcattgtcatcttggaaggcgtggtagaaaccacgggcatcaccacccaggcccgcacctcctacctagctgacgagattctatgggggcagcgctttgtccccattgtggccgaggaggacggccgctattctgtggactactccaaatttggtaacaccattaaagtgcccacaccactctgcacagcccgccagcttgatgaggaccgcagt

SEQ ID NO: 86 - protein, 787 aa, Artificial sequence
  Synthetic Construct
MDPLNLSWYDDDLERQNWSRPFNGSDGKADRPHYNYYATLLTLLIAVIVFGNVLVCMAVSREKALQTTTNYLIVSLAVADLLVATLVMPWVVYLEVVGEWKFSRIHCDIFVTLDVMMCTASILNLCAISIDRYTAVAMPMLYNTRYSSKRRVTVMISIVWVLSFTISCPLLFGLNNADQNECIIANPAFVVYSSIVSFYVPFIVTLLVYIKIYIVLRRRRKRVNTKRSSRAFRAHLRAPLKGNCTHPEDMKLCTVIMKSNGSFPVNRRRVEAARRAQELEMEMLSSTSPPERTRYSPIPPSHHQLTLPDPSHHGLHSTPDSPAKPEKNGHAKDHPKIAKIFEIQTMPNGKTRTSLKTMSRRKLSQQKEKKATQMLAIVLGVFIICWLPFFITHILNIHCDCNIPPVLYSAFTWLGYVNSAVNPIIYTTFNIEFRKAFLKILHCRRARFVSKKGNCNVAHKNIREQGRFLQDVFTTLVDLKWPHTLLIFTMSFLCSWLLFAMVWWLIAFAHGDLYAYMEKGITDLAPYPYDVPDYAGEGTNVPCVTSIHSFSSAFLFSIEVQVTIGFGGRMVTEECPLAILILIVQNIVGLMINAIMLGCIFMKTAQAHRRAETLIFSKHAVITLRHGRLCFMLRVGDLRKSMIISATIHMQVVRKTTSPEGEVVPLHQVDIPMENGVGGNGIFLVAPLIIYHVIDSNSPLYDLAPSDLHHHQDLEIIVILEGVVETTGITTQARTSYLADEILWGQRFVPIVAEEDGRYSVDYSKFGNTIKVPTPLCTARQLDEDRS

SEQ ID NO: 87 - DNA, 2469 bp, Artificial sequence
  hybrid sequence
  CDS (1)..(2469)
atggatccactgaatctgtcctggtatgatgatgatctggagaggcagaactggagccggcccttcaacgggtcagacgggaaggcggacagaccccactacaactactatgccacactgctcaccctgctcatcgctgtcatcgtcttcggcaacgtgctggtgtgcatggctgtgtcccgcgagaaggcgctgcagaccaccaccaactacctgatcgtcagcctcgcagtggccgacctcctcgtcgccacactggtcatgccctgggttgtctacctggaggtggtaggtgagtggaaattcagcaggattcactgtgacatcttcgtcactctggacgtcatgatgtgcacggcgagcatcctgaacttgtgtgccatcagcatcgacaggtacacagctgtggccatgcccatgctgtacaatacgcgctacagctccaagcgccgggtcaccgtcatgatctccatcgtctgggtcctgtccttcaccatctcctgcccactcctcttcggactcaataacgcagaccagaacgagtgcatcattgccaacccggccttcgtggtctactcctccatcgtctccttctacgtgcccttcattgtcaccctgctggtctacatcaagatctacattgtcctccgcagacgccgcaagcgagtcaacaccaaacgcagcagccgagctttcagggcccacctgagggctccactaaagggcaactgtactcaccccgaggacatgaaactctgcaccgttatcatgaagtctaatgggagtttcccagtgaacaggcggagagtggaggctgcccggcgagcccaggagctggagatggagatgctctccagcaccagcccacccgagaggacccggtacagccccatcccacccagccaccaccagctgactctccccgacccgtcccaccatggtctccacagcactcccgacagccccgccaaaccagagaagaatgggcatgccaaagaccaccccaagattgccaagatctttgagatccagaccatgcccaatggcaaaacccggacctccctcaagaccatgagccgtaggaagctctcccagcagaaggagaagaaagccactcagatgctcgccattgttctcggcgtgttcatcatctgctggctgcccttcttcatcacacacatcctgaacatacactgtgactgcaacatcccgcctgtcctgtacagcgccttcacgtggctgggctatgtcaacagcgccgtgaaccccatcatctacaccaccttcaacattgagttccgcaaggccttcctgaagatcctccactgcaggagggcccgcttcgtgtccaagaaaggcaactgcaacgtcgcccacaagaacattcgagagcagggccgcttcctgcaggatgtgttcaccacgctggtggacctcaaatggccacacactctgctcattttcaccatgtccttcctgtgcagctggctgctctttgccatggtctggtggctcatcgccttcgcccacggtgatctctatgcttacatggagaaaggcatcacggacctggccccctacccatacgatgtaccagattacgccggagagggcaccaatgtgccctgcgtcacaagcatccactccttttcatctgccttccttttctccatcgaggtccaggtgaccattggtttcggcgggcgcatggtgacagaggaatgtcccctggccatcctcattctcattgtgcagaatatcgtcgggctgatgatcaacgccatcatgctgggctgcatcttcatgaaaacggcccaggcacatcggcgggcagaaaccctcatcttcagcaagcatgctgtgatcaccctgcgccatggccgcctgtgcttcatgctgcgcgtaggggacctccgaaagagcatgatcattagcgccaccatccacatgcaggtggtgcgcaagaccaccagccccgagggcgaagttgtgcctctccaccaggtagacatccccatggagaatggcgtgggtggtaacggcatcttcctggtggccccactcatcatctaccacgtcatcgactccaacagcccgctctacgacctggctcctagtgacctgcaccaccaccaggacctggagatcattgtcatcttggaaggcgtggtagaaaccacgggcatcaccacccaggcccgcacctcctacctagctgacgagattctatgggggcagcgctttgtccccattgtggccgaggaggacggccgctattctgtggactactccaaatttggtaacaccattaaagtgcccacaccactctgcacagcccgccagcttgatgaggaccgcagtctgctggatgccctgaccctcgcctcgtcgcgggggcccctgcgcaagcgcagtgtggctgtggcgaaggccaagcccaagtttagcatctctccagattccttgtcc

SEQ ID NO: 88 - protein, 823 aa, Artificial sequence
  Synthetic Construct
MDPLNLSWYDDDLERQNWSRPFNGSDGKADRPHYNYYATLLTLLIAVIVFGNVLVCMAVSREKALQTTTNYLIVSLAVADLLVATLVMPWVVYLEVVGEWKFSRIHCDIFVTLDVMMCTASILNLCAISIDRYTAVAMPMLYNTRYSSKRRVTVMISIVWVLSFTISCPLLFGLNNADQNECIIANPAFVVYSSIVSFYVPFIVTLLVYIKIYIVLRRRRKRVNTKRSSRAFRAHLRAPLKGNCTHPEDMKLCTVIMKSNGSFPVNRRRVEAARRAQELEMEMLSSTSPPERTRYSPIPPSHHQLTLPDPSHHGLHSTPDSPAKPEKNGHAKDHPKIAKIFEIQTMPNGKTRTSLKTMSRRKLSQQKEKKATQMLAIVLGVFIICWLPFFITHILNIHCDCNIPPVLYSAFTWLGYVNSAVNPIIYTTFNIEFRKAFLKILHCRRARFVSKKGNCNVAHKNIREQGRFLQDVFTTLVDLKWPHTLLIFTMSFLCSWLLFAMVWWLIAFAHGDLYAYMEKGITDLAPYPYDVPDYAGEGTNVPCVTSIHSFSSAFLFSIEVQVTIGFGGRMVTEECPLAILILIVQNIVGLMINAIMLGCIFMKTAQAHRRAETLIFSKHAVITLRHGRLCFMLRVGDLRKSMIISATIHMQVVRKTTSPEGEVVPLHQVDIPMENGVGGNGIFLVAPLIIYHVIDSNSPLYDLAPSDLHHHQDLEIIVILEGVVETTGITTQARTSYLADEILWGQRFVPIVAEEDGRYSVDYSKFGNTIKVPTPLCTARQLDEDRSLLDALTLASSRGPLRKRSVAVAKAKPKFSISPDSLS

SEQ ID NO: 89 - DNA, 2409 bp, Artificial sequence
  hybrid sequence
  CDS (1)..(2409)
atggatccactgaatctgtcctggtatgatgatgatctggagaggcagaactggagccggcccttcaacgggtcagacgggaaggcggacagaccccactacaactactatgccacactgctcaccctgctcatcgctgtcatcgtcttcggcaacgtgctggtgtgcatggctgtgtcccgcgagaaggcgctgcagaccaccaccaactacctgatcgtcagcctcgcagtggccgacctcctcgtcgccacactggtcatgccctgggttgtctacctggaggtggtaggtgagtggaaattcagcaggattcactgtgacatcttcgtcactctggacgtcatgatgtgcacggcgagcatcctgaacttgtgtgccatcagcatcgacaggtacacagctgtggccatgcccatgctgtacaatacgcgctacagctccaagcgccgggtcaccgtcatgatctccatcgtctgggtcctgtccttcaccatctcctgcccactcctcttcggactcaataacgcagaccagaacgagtgcatcattgccaacccggccttcgtggtctactcctccatcgtctccttctacgtgcccttcattgtcaccctgctggtctacatcaagatctacattgtcctccgcagacgccgcaagcgagtcaacaccaaacgcagcagccgagctttcagggcccacctgagggctccactaaagggcaactgtactcaccccgaggacatgaaactctgcaccgttatcatgaagtctaatgggagtttcccagtgaacaggcggagagtggaggctgcccggcgagcccaggagctggagatggagatgctctccagcaccagcccacccgagaggacccggtacagccccatcccacccagccaccaccagctgactctccccgacccgtcccaccatggtctccacagcactcccgacagccccgccaaaccagagaagaatgggcatgccaaagaccaccccaagattgccaagatctttgagatccagaccatgcccaatggcaaaacccggacctccctcaagaccatgagccgtaggaagctctcccagcagaaggagaagaaagccactcagatgctcgccattgttctcggcgtgttcatcatctgctggctgcccttcttcatcacacacatcctgaacatacactgtgactgcaacatcccgcctgtcctgtacagcgccttcacgtggctgggctatgtcaacagcgccgtgaaccccatcatctacaccaccttcaacattgagttccgcaaggccttcctgaagatcctccactgcaggagggcccgcttcgtgtccaagaaaggcaactgcaacgtcgcccacaagaacattcgagagcagggccgcttcctgcaggatgtgttcaccacgctggtggacctcaaatggccacacactctgctcattttcaccatgtccttcctgtgcagctggctgctctttgccatggtctggtggctcatcgccttcgcccacggtgacctggcccccggagagggcaccaatgtgccctgcgtcacaagcatccactccttttcatctgccttccttttctccatcgaggtccaggtgaccattggtttcggcgggcgcatggtgacagaggaatgtcccctggccatcctcattctcattgtgcagaatatcgtcgggctgatgatcaacgccatcatgctgggctgcatcttcatgaaaacggcccaggcacatcggcgggcagaaaccctcatcttcagcaagcatgctgtgatcaccctgcgccatggccgcctgtgcttcatgctgcgcgtaggggacctccgaaagagcatgatcattagcgccaccatccacatgcaggtggtgcgcaagaccaccagccccgagggcgaagttgtgcctctccaccaggtagacatccccatggagaatggcgtgggtggtaacggcatcttcctggtggccccactcatcatctaccacgtcatcgactccaacagcccgctctacgacctggctcctagtgacctgcaccaccaccaggacctggagatcattgtcatcttggaaggcgtggtagaaaccacgggcatcaccacccaggcccgcacctcctacctagctgacgagattctatgggggcagcgctttgtccccattgtggccgaggaggacggccgctattctgtggactactccaaatttggtaacaccattaaagtgcccacaccactctgcacagcccgccagcttgatgaggaccgcagtctgctggatgccctgaccctcgcctcgtcgcgggggcccctgcgcaagcgcagtgtggctgtggcgaaggccaagcccaagtttagcatctctccagattccttgtcc

SEQ ID NO: 90 - protein, 803 aa, Artificial sequence
  Synthetic Construct
MDPLNLSWYDDDLERQNWSRPFNGSDGKADRPHYNYYATLLTLLIAVIVFGNVLVCMAVSREKALQTTTNYLIVSLAVADLLVATLVMPWVVYLEVVGEWKFSRIHCDIFVTLDVMMCTASILNLCAISIDRYTAVAMPMLYNTRYSSKRRVTVMISIVWVLSFTISCPLLFGLNNADQNECIIANPAFVVYSSIVSFYVPFIVTLLVYIKIYIVLRRRRKRVNTKRSSRAFRAHLRAPLKGNCTHPEDMKLCTVIMKSNGSFPVNRRRVEAARRAQELEMEMLSSTSPPERTRYSPIPPSHHQLTLPDPSHHGLHSTPDSPAKPEKNGHAKDHPKIAKIFEIQTMPNGKTRTSLKTMSRRKLSQQKEKKATQMLAIVLGVFIICWLPFFITHILNIHCDCNIPPVLYSAFTWLGYVNSAVNPIIYTTFNIEFRKAFLKILHCRRARFVSKKGNCNVAHKNIREQGRFLQDVFTTLVDLKWPHTLLIFTMSFLCSWLLFAMVWWLIAFAHGDLAPGEGTNVPCVTSIHSFSSAFLFSIEVQVTIGFGGRMVTEECPLAILILIVQNIVGLMINAIMLGCIFMKTAQAHRRAETLIFSKHAVITLRHGRLCFMLRVGDLRKSMIISATIHMQVVRKTTSPEGEVVPLHQVDIPMENGVGGNGIFLVAPLIIYHVIDSNSPLYDLAPSDLHHHQDLEIIVILEGVVETTGITTQARTSYLADEILWGQRFVPIVAEEDGRYSVDYSKFGNTIKVPTPLCTARQLDEDRSLLDALTLASSRGPLRKRSVAVAKAKPKFSISPDSLS

SEQ ID NO: 91 - DNA, 2301 bp, Artificial sequence
  hybrid sequence
  CDS (1)..(2301)
atggatccactgaatctgtcctggtatgatgatgatctggagaggcagaactggagccggcccttcaacgggtcagacgggaaggcggacagaccccactacaactactatgccacactgctcaccctgctcatcgctgtcatcgtcttcggcaacgtgctggtgtgcatggctgtgtcccgcgagaaggcgctgcagaccaccaccaactacctgatcgtcagcctcgcagtggccgacctcctcgtcgccacactggtcatgccctgggttgtctacctggaggtggtaggtgagtggaaattcagcaggattcactgtgacatcttcgtcactctggacgtcatgatgtgcacggcgagcatcctgaacttgtgtgccatcagcatcgacaggtacacagctgtggccatgcccatgctgtacaatacgcgctacagctccaagcgccgggtcaccgtcatgatctccatcgtctgggtcctgtccttcaccatctcctgcccactcctcttcggactcaataacgcagaccagaacgagtgcatcattgccaacccggccttcgtggtctactcctccatcgtctccttctacgtgcccttcattgtcaccctgctggtctacatcaagatctacattgtcctccgcagacgccgcaagcgagtcaacaccaaacgcagcagccgagctttcagggcccacctgagggctccactaaagggcaactgtactcaccccgaggacatgaaactctgcaccgttatcatgaagtctaatgggagtttcccagtgaacaggcggagagtggaggctgcccggcgagcccaggagctggagatggagatgctctccagcaccagcccacccgagaggacccggtacagccccatcccacccagccaccaccagctgactctccccgacccgtcccaccatggtctccacagcactcccgacagccccgccaaaccagagaagaatgggcatgccaaagaccaccccaagattgccaagatctttgagatccagaccatgcccaatggcaaaacccggacctccctcaagaccatgagccgtaggaagctctcccagcagaaggagaagaaagccactcagatgctcgccattgttctcggcgtgttcatcatctgctggctgcccttcttcatcacacacatcctgaacatacactgtgactgcaacatcccgcctgtcctgtacagcgccttcacgtggctgggctatgtcaacagcgccgtgaaccccatcatctacaccaccttcaacattgagttccgcaaggccttcctgaagatcctccactgcaggagggcccgcttcgtgtccaagaaaggcaactgcaacgtcgcccacaagaacattcgagagcagggccgcttcctgcaggatgtgttcaccacgctggtggacctcaaatggccacacactctgctcattttcaccatgtccttcctgtgcagctggctgctctttgccatggtctggtggctcatcgccttcgcccacggtgacctggcccccggagagggcaccaatgtgccctgcgtcacaagcatccactccttttcatctgccttccttttctccatcgaggtccaggtgaccattggtttcggcgggcgcatggtgacagaggaatgtcccctggccatcctcattctcattgtgcagaatatcgtcgggctgatgatcaacgccatcatgctgggctgcatcttcatgaaaacggcccaggcacatcggcgggcagaaaccctcatcttcagcaagcatgctgtgatcaccctgcgccatggccgcctgtgcttcatgctgcgcgtaggggacctccgaaagagcatgatcattagcgccaccatccacatgcaggtggtgcgcaagaccaccagccccgagggcgaagttgtgcctctccaccaggtagacatccccatggagaatggcgtgggtggtaacggcatcttcctggtggccccactcatcatctaccacgtcatcgactccaacagcccgctctacgacctggctcctagtgacctgcaccaccaccaggacctggagatcattgtcatcttggaaggcgtggtagaaaccacgggcatcaccacccaggcccgcacctcctacctagctgacgagattctatgggggcagcgctttgtccccattgtggccgaggaggacggccgctattctgtggactactccaaatttggtaacaccattaaagtgcccacaccactctgcacagcccgccagcttgatgaggaccgcagt

SEQ ID NO: 92 - protein, 767 aa, Artificial sequence
  Synthetic Construct
MDPLNLSWYDDDLERQNWSRPFNGSDGKADRPHYNYYATLLTLLIAVIVFGNVLVCMAVSREKALQTTTNYLIVSLAVADLLVATLVMPWVVYLEVVGEWKFSRIHCDIFVTLDVMMCTASILNLCAISIDRYTAVAMPMLYNTRYSSKRRVTVMISIVWVLSFTISCPLLFGLNNADQNECIIANPAFVVYSSIVSFYVPFIVTLLVYIKIYIVLRRRRKRVNTKRSSRAFRAHLRAPLKGNCTHPEDMKLCTVIMKSNGSFPVNRRRVEAARRAQELEMEMLSSTSPPERTRYSPIPPSHHQLTLPDPSHHGLHSTPDSPAKPEKNGHAKDHPKIAKIFEIQTMPNGKTRTSLKTMSRRKLSQQKEKKATQMLAIVLGVFIICWLPFFITHILNIHCDCNIPPVLYSAFTWLGYVNSAVNPIIYTTFNIEFRKAFLKILHCRRARFVSKKGNCNVAHKNIREQGRFLQDVFTTLVDLKWPHTLLIFTMSFLCSWLLFAMVWWLIAFAHGDLAPGEGTNVPCVTSIHSFSSAFLFSIEVQVTIGFGGRMVTEECPLAILILIVQNIVGLMINAIMLGCIFMKTAQAHRRAETLIFSKHAVITLRHGRLCFMLRVGDLRKSMIISATIHMQVVRKTTSPEGEVVPLHQVDIPMENGVGGNGIFLVAPLIIYHVIDSNSPLYDLAPSDLHHHQDLEIIVILEGVVETTGITTQARTSYLADEILWGQRFVPIVAEEDGRYSVDYSKFGNTIKVPTPLCTARQLDEDRS

SEQ ID NO: 93 - DNA, 2394 bp, Artificial sequence
  hybrid sequence
  CDS (1)..(2394)
atggggcaacccgggaacggcagcgccttcttgctggcacccaatggaagccatgcgccggaccacgacgtcacgcagcaaagggacgaggtgtgggtggtgggcatgggcatcgtcatgtctctcatcgtcctggccatcgtgtttggcaatgtgctggtcatcacagccattgccaagttcgagcgtctgcagacggtcaccaactacttcatcacttcactggcctgtgctgatctggtcatgggcctagcagtggtgccctttggggccgcccatattcttatgaaaatgtggacttttggcaacttctggtgcgagttttggacttccattgatgtgctgtgcgtcacggccagcattgagaccctgtgcgtgatcgcagtggatcgctactttgccattacttcacctttcaagtaccagagcctgctgaccaagaataaggcccgggtgatcattctgatggtgtggattgtgtcaggccttacctccttcttgcccattcagatgcactggtacagggccacccaccaggaagccatcaactgctatgccaatgagacctgctgtgacttcttcacgaaccaagcctatgccattgcctcttccatcgtgtccttctacgttcccctggtgatcatggtcttcgtctactccagggtctttcaggaggccaaaaggcagctccagaagattgacaaatctgagggccgcttccatgtccagaaccttagccaggtggagcaggatgggcggacggggcatggactccgcagatcttccaagttctgcttgaaggagcacaaagccctcaagacgttaggcatcatcatgggcactttcaccctctgctggctgcccttcttcatcgttaacattgtgcatgtgatccaggataacctcatccgtaaggaagtttacatcctcctaaattggataggctatgtcaattctggtttcaatccccttatctactgccggagcccagatttcaggattgccttccaggagcttctgtgcctgcgcaggtcttctttgaaggcctatggcaatggctactccagcaacggcaacacaggggagcagagtggatatcacgtggaacaggagaaagaaaataaactgctgtgtgaagacctcccaggcacggaagactttgtgggccatcaaggtactgtgcctagcgataacattgattcacaagggaggaattgtagtacaaatgactcactgctataccgtactcgagagaggagggcccgcttcgtgtccaagaaaggcaactgcaacgtcgcccacaagaacattcgagagcagggccgcttcctgcaggatgtgttcaccacgctggtggacctcaaatggccacacactctgctcattttcaccatgtccttcctgtgcagctggctgctctttgccatggtctggtggctcatcgccttcgcccacggtgatctctatgcttacatggagaaaggcatcacggacctggccccctacccatacgatgtaccagattacgccggagagggcaccaatgtgccctgcgtcacaagcatccactccttttcatctgccttccttttctccatcgaggtccaggtgaccattggtttcggcgggcgcatggtgacagaggaatgtcccctggccatcctcattctcattgtgcagaatatcgtcgggctgatgatcaacgccatcatgctgggctgcatcttcatgaaaacggcccaggcacatcggcgggcagaaaccctcatcttcagcaagcatgctgtgatcaccctgcgccatggccgcctgtgcttcatgctgcgcgtaggggacctccgaaagagcatgatcattagcgccaccatccacatgcaggtggtgcgcaagaccaccagccccgagggcgaagttgtgcctctccaccaggtagacatccccatggagaatggcgtgggtggtaacggcatcttcctggtggccccactcatcatctaccacgtcatcgactccaacagcccgctctacgacctggctcctagtgacctgcaccaccaccaggacctggagatcattgtcatcttggaaggcgtggtagaaaccacgggcatcaccacccaggcccgcacctcctacctagctgacgagattctatgggggcagcgctttgtccccattgtggccgaggaggacggccgctattctgtggactactccaaatttggtaacaccattaaagtgcccacaccactctgcacagcccgccagcttgatgaggaccgcagtctgctggatgccctgaccctcgcctcgtcgcgggggcccctgcgcaagcgcagtgtggctgtggcgaaggccaagcccaagtttagcatctctccagattccttgtcc

SEQ ID NO: 94 - protein, 798 aa, Artificial sequence [sequence omitted]

SEQ ID NO: 95 - DNA, 2226 bp, Artificial sequence
  hybrid sequence
  CDS (1)..(2226)
atggggcaacccgggaacggcagcgccttcttgctggcacccaatggaagccatgcgccggaccacgacgtcacgcagcaaagggacgaggtgtgggtggtgggcatgggcatcgtcatgtctctcatcgtcctggccatcgtgtttggcaatgtgctggtcatcacagccattgccaagttcgagcgtctgcagacggtcaccaactacttcatcacttcactggcctgtgctgatctggtcatgggcctagcagtggtgccctttggggccgcccatattcttatgaaaatgtggacttttggcaacttctggtgcgagttttggacttccattgatgtgctgtgcgtcacggccagcattgagaccctgtgcgtgatcgcagtggatcgctactttgccattacttcacctttcaagtaccagagcctgctgaccaagaataaggcccgggtgatcattctgatggtgtggattgtgtcaggccttacctccttcttgcccattcagatgcactggtacagggccacccaccaggaagccatcaactgctatgccaatgagacctgctgtgacttcttcacgaaccaagcctatgccattgcctcttccatcgtgtccttctacgttcccctggtgatcatggtcttcgtctactccagggtctttcaggaggccaaaaggcagctccagaagattgacaaatctgagggccgcttccatgtccagaaccttagccaggtggagcaggatgggcggacggggcatggactccgcagatcttccaagttctgcttgaaggagcacaaagccctcaagacgttaggcatcatcatgggcactttcaccctctgctggctgcccttcttcatcgttaacattgtgcatgtgatccaggataacctcatccgtaaggaagtttacatcctcctaaattggataggctatgtcaattctggtttcaatccccttatctactgccggagcccagatttcaggattgccttccaggagcttctgtgcctgcgcaggtcttctttgaaggcctatggcaatggctactccagcaacggcaacacaggggagcagagtggatatcacgtggaacaggagaaagaaaataaactgctgtgtgaagacctcccaggcacggaagactttgtgggccatcaaggtactgtgcctagcgataacattgattcacaagggaggaattgtagtacaaatgactcactgctataccgtactcgagagaggagggcccgcttcgtgtccaagaaaggcaactgcaacgtcgcccacaagaacattcgagagcagggccgcttcctgcaggatgtgttcaccacgctggtggacctcaaatggccacacactctgctcattttcaccatgtccttcctgtgcagctggctgctctttgccatggtctggtggctcatcgccttcgcccacggtgacctggcccccggagagggcaccaatgtgccctgcgtcacaagcatccactccttttcatctgccttccttttctccatcgaggtccaggtgaccattggtttcggcgggcgcatggtgacagaggaatgtcccctggccatcctcattctcattgtgcagaatatcgtcgggctgatgatcaacgccatcatgctgggctgcatcttcatgaaaacggcccaggcacatcggcgggcagaaaccctcatcttcagcaagcatgctgtgatcaccctgcgccatggccgcctgtgcttcatgctgcgcgtaggggacctccgaaagagcatgatcattagcgccaccatccacatgcaggtggtgcgcaagaccaccagccccgagggcgaagttgtgcctctccaccaggtagacatccccatggagaatggcgtgggtggtaacggcatcttcctggtggccccactcatcatctaccacgtcatcgactccaacagcccgctctacgacctggctcctagtgacctgcaccaccaccaggacctggagatcattgtcatcttggaaggcgtggtagaaaccacgggcatcaccacccaggcccgcacctcctacctagctgacgagattctatgggggcagcgctttgtccccattgtggccgaggaggacggccgctattctgtggactactccaaatttggtaacaccattaaagtgcccacaccactctgcacagcccgccagcttgatgaggaccgcagt

SEQ ID NO: 96 - protein, 742 aa, Artificial sequence [sequence omitted]

SEQ ID NO: 97 - DNA, 2334 bp, Artificial sequence
  hybrid sequence
  CDS (1)..(2334)
atggggcaacccgggaacggcagcgccttcttgctggcacccaatggaagccatgcgccggaccacgacgtcacgcagcaaagggacgaggtgtgggtggtgggcatgggcatcgtcatgtctctcatcgtcctggccatcgtgtttggcaatgtgctggtcatcacagccattgccaagttcgagcgtctgcagacggtcaccaactacttcatcacttcactggcctgtgctgatctggtcatgggcctagcagtggtgccctttggggccgcccatattcttatgaaaatgtggacttttggcaacttctggtgcgagttttggacttccattgatgtgctgtgcgtcacggccagcattgagaccctgtgcgtgatcgcagtggatcgctactttgccattacttcacctttcaagtaccagagcctgctgaccaagaataaggcccgggtgatcattctgatggtgtggattgtgtcaggccttacctccttcttgcccattcagatgcactggtacagggccacccaccaggaagccatcaactgctatgccaatgagacctgctgtgacttcttcacgaaccaagcctatgccattgcctcttccatcgtgtccttctacgttcccctggtgatcatggtcttcgtctactccagggtctttcaggaggccaaaaggcagctccagaagattgacaaatctgagggccgcttccatgtccagaaccttagccaggtggagcaggatgggcggacggggcatggactccgcagatcttccaagttctgcttgaaggagcacaaagccctcaagacgttaggcatcatcatgggcactttcaccctctgctggctgcccttcttcatcgttaacattgtgcatgtgatccaggataacctcatccgtaaggaagtttacatcctcctaaattggataggctatgtcaattctggtttcaatccccttatctactgccggagcccagatttcaggattgccttccaggagcttctgtgcctgcgcaggtcttctttgaaggcctatggcaatggctactccagcaacggcaacacaggggagcagagtggatatcacgtggaacaggagaaagaaaataaactgctgtgtgaagacctcccaggcacggaagactttgtgggccatcaaggtactgtgcctagcgataacattgattcacaagggaggaattgtagtacaaatgactcactgctataccgtactcgagagaggagggcccgcttcgtgtccaagaaaggcaactgcaacgtcgcccacaagaacattcgagagcagggccgcttcctgcaggatgtgttcaccacgctggtggacctcaaatggccacacactctgctcattttcaccatgtccttcctgtgcagctggctgctctttgccatggtctggtggctcatcgccttcgcccacggtgacctggcccccggagagggcaccaatgtgccctgcgtcacaagcatccactccttttcatctgccttccttttctccatcgaggtccaggtgaccattggtttcggcgggcgcatggtgacagaggaatgtcccctggccatcctcattctcattgtgcagaatatcgtcgggctgatgatcaacgccatcatgctgggctgcatcttcatgaaaacggcccaggcacatcggcgggcagaaaccctcatcttcagcaagcatgctgtgatcaccctgcgccatggccgcctgtgcttcatgctgcgcgtaggggacctccgaaagagcatgatcattagcgccaccatccacatgcaggtggtgcgcaagaccaccagccccgagggcgaagttgtgcctctccaccaggtagacatccccatggagaatggcgtgggtggtaacggcatcttcctggtggccccactcatcatctaccacgtcatcgactccaacagcccgctctacgacctggctcctagtgacctgcaccaccaccaggacctggagatcattgtcatcttggaaggcgtggtagaaaccacgggcatcaccacccaggcccgcacctcctacctagctgacgagattctatgggggcagcgctttgtccccattgtggccgaggaggacggccgctattctgtggactactccaaatttggtaacaccattaaagtgcccacaccactctgcacagcccgccagcttgatgaggaccgcagtctgctggatgccctgaccctcgcctcgtcgcgggggcccctgcgcaagcgcagtgtggctgtggcgaaggccaagcccaagtttagcatctctccagattccttgtcc

SEQ ID NO: 98 - protein, 778 aa, Artificial sequence
  Synthetic Construct
MGQPGNGSAFLLAPNGSHAPDHDVTQQRDEVWVVGMGIVMSLIVLAIVFGNVLVITAIAKFERLQTVTNYFITSLACADLVMGLAVVPFGAAHILMKMWTFGNFWCEFWTSIDVLCVTASIETLCVIAVDRYFAITSPFKYQSLLTKNKARVIILMVWIVSGLTSFLPIQMHWYRATHQEAINCYANETCCDFFTNQAYAIASSIVSFYVPLVIMVFVYSRVFQEAKRQLQKIDKSEGRFHVQNLSQVEQDGRTGHGLRRSSKFCLKEHKALKTLGIIMGTFTLCWLPFFIVNIVHVIQDNLIRKEVYILLNWIGYVNSGFNPLIYCRSPDFRIAFQELLCLRRSSLKAYGNGYSSNGNTGEQSGYHVEQEKENKLLCEDLPGTEDFVGHQGTVPSDNIDSQGRNCSTNDSLLYRTRERRARFVSKKGNCNVAHKNIREQGRFLQDVFTTLVDLKWPHTLLIFTMSFLCSWLLFAMVWWLIAFAHGDLAPGEGTNVPCVTSIHSFSSAFLFSIEVQVTIGFGGRMVTEECPLAILILIVQNIVGLMINAIMLGCIFMKTAQAHRRAETLIFSKHAVITLRHGRLCFMLRVGDLRKSMIISATIHMQVVRKTTSPEGEVVPLHQVDIPMENGVGGNGIFLVAPLIIYHVIDSNSPLYDLAPSDLHHHQDLEIIVILEGVVETTGITTQARTSYLADEILWGQRFVPIVAEEDGRYSVDYSKFGNTIKVPTPLCTARQLDEDRSLLDALTLASSRGPLRKRSVAVAKAKPKFSISPDSLS

SEQ ID NO: 99 - DNA, 2286 bp, Artificial sequence
  hybrid sequence
  CDS (1)..(2286)
atggggcaacccgggaacggcagcgccttcttgctggcacccaatggaagccatgcgccggaccacgacgtcacgcagcaaagggacgaggtgtgggtggtgggcatgggcatcgtcatgtctctcatcgtcctggccatcgtgtttggcaatgtgctggtcatcacagccattgccaagttcgagcgtctgcagacggtcaccaactacttcatcacttcactggcctgtgctgatctggtcatgggcctagcagtggtgccctttggggccgcccatattcttatgaaaatgtggacttttggcaacttctggtgcgagttttggacttccattgatgtgctgtgcgtcacggccagcattgagaccctgtgcgtgatcgcagtggatcgctactttgccattacttcacctttcaagtaccagagcctgctgaccaagaataaggcccgggtgatcattctgatggtgtggattgtgtcaggccttacctccttcttgcccattcagatgcactggtacagggccacccaccaggaagccatcaactgctatgccaatgagacctgctgtgacttcttcacgaaccaagcctatgccattgcctcttccatcgtgtccttctacgttcccctggtgatcatggtcttcgtctactccagggtctttcaggaggccaaaaggcagctccagaagattgacaaatctgagggccgcttccatgtccagaaccttagccaggtggagcaggatgggcggacggggcatggactccgcagatcttccaagttctgcttgaaggagcacaaagccctcaagacgttaggcatcatcatgggcactttcaccctctgctggctgcccttcttcatcgttaacattgtgcatgtgatccaggataacctcatccgtaaggaagtttacatcctcctaaattggataggctatgtcaattctggtttcaatccccttatctactgccggagcccagatttcaggattgccttccaggagcttctgtgcctgcgcaggtcttctttgaaggcctatggcaatggctactccagcaacggcaacacaggggagcagagtggatatcacgtggaacaggagaaagaaaataaactgctgtgtgaagacctcccaggcacggaagactttgtgggccatcaaggtactgtgcctagcgataacattgattcacaagggaggaattgtagtacaaatgactcactgctataccgtactcgagagaggagggcccgcttcgtgtccaagaaaggcaactgcaacgtcgcccacaagaacattcgagagcagggccgcttcctgcaggatgtgttcaccacgctggtggacctcaaatggccacacactctgctcattttcaccatgtccttcctgtgcagctggctgctctttgccatggtctggtggctcatcgccttcgcccacggtgatctctatgcttacatggagaaaggcatcacggacctggccccctacccatacgatgtaccagattacgccggagagggcaccaatgtgccctgcgtcacaagcatccactccttttcatctgccttccttttctccatcgaggtccaggtgaccattggtttcggcgggcgcatggtgacagaggaatgtcccctggccatcctcattctcattgtgcagaatatcgtcgggctgatgatcaacgccatcatgctgggctgcatcttcatgaaaacggcccaggcacatcggcgggcagaaaccctcatcttcagcaagcatgctgtgatcaccctgcgccatggccgcctgtgcttcatgctgcgcgtaggggacctccgaaagagcatgatcattagcgccaccatccacatgcaggtggtgcgcaagaccaccagccccgagggcgaagttgtgcctctccaccaggtagacatccccatggagaatggcgtgggtggtaacggcatcttcctggtggccccactcatcatctaccacgtcatcgactccaacagcccgctctacgacctggctcctagtgacctgcaccaccaccaggacctggagatcattgtcatcttggaaggcgtggtagaaaccacgggcatcaccacccaggcccgcacctcctacctagctgacgagattctatgggggcagcgctttgtccccattgtggccgaggaggacggccgctattctgtggactactccaaatttggtaacaccattaaagtgcccacaccactctgcacagcccgccagcttgatgaggaccgcagt

SEQ ID NO: 100 - protein, 762 aa, Artificial sequence
  Synthetic Construct
MGQPGNGSAFLLAPNGSHAPDHDVTQQRDEVWVVGMGIVMSLIVLAIVFGNVLVITAIAKFERLQTVTNYFITSLACADLVMGLAVVPFGAAHILMKMWTFGNFWCEFWTSIDVLCVTASIETLCVIAVDRYFAITSPFKYQSLLTKNKARVIILMVWIVSGLTSFLPIQMHWYRATHQEAINCYANETCCDFFTNQAYAIASSIVSFYVPLVIMVFVYSRVFQEAKRQLQKIDKSEGRFHVQNLSQVEQDGRTGHGLRRSSKFCLKEHKALKTLGIIMGTFTLCWLPFFIVNIVHVIQDNLIRKEVYILLNWIGYVNSGFNPLIYCRSPDFRIAFQELLCLRRSSLKAYGNGYSSNGNTGEQSGYHVEQEKENKLLCEDLPGTEDFVGHQGTVPSDNIDSQGRNCSTNDSLLYRTRERRARFVSKKGNCNVAHKNIREQGRFLQDVFTTLVDLKWPHTLLIFTMSFLCSWLLFAMVWWLIAFAHGDLYAYMEKGITDLAPYPYDVPDYAGEGTNVPCVTSIHSFSSAFLFSIEVQVTIGFGGRMVTEECPLAILILIVQNIVGLMINAIMLGCIFMKTAQAHRRAETLIFSKHAVITLRHGRLCFMLRVGDLRKSMIISATIHMQVVRKTTSPEGEVVPLHQVDIPMENGVGGNGIFLVAPLIIYHVIDSNSPLYDLAPSDLHHHQDLEIIVILEGVVETTGITTQARTSYLADEILWGQRFVPIVAEEDGRYSVDYSKFGNTIKVPTPLCTARQLDEDRS

SEQ ID NO: 101 - DNA, 2205 bp, Artificial sequence
  hybrid sequence
  CDS (1)..(2205)
atggggcaacccgggaacggcagcgccttcttgctggcacccaatggaagccatgcgccggaccacgacgtcacgcagcaaagggacgaggtgtgggtggtgggcatgggcatcgtcatgtctctcatcgtcctggccatcgtgtttggcaatgtgctggtcatcacagccattgccaagttcgagcgtctgcagacggtcaccaactacttcatcacttcactggcctgtgctgatctggtcatgggcctagcagtggtgccctttggggccgcccatattcttatgaaaatgtggacttttggcaacttctggtgcgagttttggacttccattgatgtgctgtgcgtcacggccagcattgagaccctgtgcgtgatcgcagtggatcgctactttgccattacttcacctttcaagtaccagagcctgctgaccaagaataaggcccgggtgatcattctgatggtgtggattgtgtcaggccttacctccttcttgcccattcagatgcactggtacagggccacccaccaggaagccatcaactgctatgccaatgagacctgctgtgacttcttcacgaaccaagcctatgccattgcctcttccatcgtgtccttctacgttcccctggtgatcatggtcttcgtctactccagggtctttcaggaggccaaaaggcagctccagaagattgacaaatctgagggccgcttccatgtccagaaccttagccaggtggagcaggatgggcggacggggcatggactccgcagatcttccaagttctgcttgaaggagcacaaagccctcaagacgttaggcatcatcatgggcactttcaccctctgctggctgcccttcttcatcgttaacattgtgcatgtgatccaggataacctcatccgtaaggaagtttacatcctcctaaattggataggctatgtcaattctggtttcaatccccttatctactgccggagcccagatttcaggattgccttccaggagcttctgtgcctgcgcaggtcttctttgaaggcctattaccgtactcgagagaggagggcccgcttcgtgtccaagaaaggcaactgcaacgtcgcccacaagaacattcgagagcagggccgcttcctgcaggatgtgttcaccacgctggtggacctcaaatggccacacactctgctcattttcaccatgtccttcctgtgcagctggctgctctttgccatggtctggtggctcatcgccttcgcccacggtgatctctatgcttacatggagaaaggcatcacggacctggccccctacccatacgatgtaccagattacgccggagagggcaccaatgtgccctgcgtcacaagcatccactccttttcatctgccttccttttctccatcgaggtccaggtgaccattggtttcggcgggcgcatggtgacagaggaatgtcccctggccatcctcattctcattgtgcagaatatcgtcgggctgatgatcaacgccatcatgctgggctgcatcttcatgaaaacggcccaggcacatcggcgggcagaaaccctcatcttcagcaagcatgctgtgatcaccctgcgccatggccgcctgtgcttcatgctgcgcgtaggggacctccgaaagagcatgatcattagcgccaccatccacatgcaggtggtgcgcaagaccaccagccccgagggcgaagttgtgcctctccaccaggtagacatccccatggagaatggcgtgggtggtaacggcatcttcctggtggccccactcatcatctaccacgtcatcgactccaacagcccgctctacgacctggctcctagtgacctgcaccaccaccaggacctggagatcattgtcatcttggaaggcgtggtagaaaccacgggcatcaccacccaggcccgcacctcctacctagctgacgagattctatgggggcagcgctttgtccccattgtggccgaggaggacggccgctattctgtggactactccaaatttggtaacaccattaaagtgcccacaccactctgcacagcccgccagcttgatgaggaccgcagtctgctggatgccctgaccctcgcctcgtcgcgggggcccctgcgcaagcgcagtgtggctgtggcgaaggccaagcccaagtttagcatctctccagattccttgtcc

SEQ ID NO: 102 - protein, 735 aa, Artificial sequence
  Synthetic Construct
MGQPGNGSAFLLAPNGSHAPDHDVTQQRDEVWVVGMGIVMSLIVLAIVFGNVLVITAIAKFERLQTVTNYFITSLACADLVMGLAVVPFGAAHILMKMWTFGNFWCEFWTSIDVLCVTASIETLCVIAVDRYFAITSPFKYQSLLTKNKARVIILMVWIVSGLTSFLPIQMHWYRATHQEAINCYANETCCDFFTNQAYAIASSIVSFYVPLVIMVFVYSRVFQEAKRQLQKIDKSEGRFHVQNLSQVEQDGRTGHGLRRSSKFCLKEHKALKTLGIIMGTFTLCWLPFFIVNIVHVIQDNLIRKEVYILLNWIGYVNSGFNPLIYCRSPDFRIAFQELLCLRRSSLKAYYRTRERRARFVSKKGNCNVAHKNIREQGRFLQDVFTTLVDLKWPHTLLIFTMSFLCSWLLFAMVWWLIAFAHGDLYAYMEKGITDLAPYPYDVPDYAGEGTNVPCVTSIHSFSSAFLFSIEVQVTIGFGGRMVTEECPLAILILIVQNIVGLMINAIMLGCIFMKTAQAHRRAETLIFSKHAVITLRHGRLCFMLRVGDLRKSMIISATIHMQVVRKTTSPEGEVVPLHQVDIPMENGVGGNGIFLVAPLIIYHVIDSNSPLYDLAPSDLHHHQDLEIIVILEGVVETTGITTQARTSYLADEILWGQRFVPIVAEEDGRYSVDYSKFGNTIKVPTPLCTARQLDEDRSLLDALTLASSRGPLRKRSVAVAKAKPKFSISPDSLS

SEQ ID NO: 103 - DNA, 2097 bp, Artificial sequence
  hybrid sequence
  CDS (1)..(2097)
atggggcaacccgggaacggcagcgccttcttgctggcacccaatggaagccatgcgccggaccacgacgtcacgcagcaaagggacgaggtgtgggtggtgggcatgggcatcgtcatgtctctcatcgtcctggccatcgtgtttggcaatgtgctggtcatcacagccattgccaagttcgagcgtctgcagacggtcaccaactacttcatcacttcactggcctgtgctgatctggtcatgggcctagcagtggtgccctttggggccgcccatattcttatgaaaatgtggacttttggcaacttctggtgcgagttttggacttccattgatgtgctgtgcgtcacggccagcattgagaccctgtgcgtgatcgcagtggatcgctactttgccattacttcacctttcaagtaccagagcctgctgaccaagaataaggcccgggtgatcattctgatggtgtggattgtgtcaggccttacctccttcttgcccattcagatgcactggtacagggccacccaccaggaagccatcaactgctatgccaatgagacctgctgtgacttcttcacgaaccaagcctatgccattgcctcttccatcgtgtccttctacgttcccctggtgatcatggtcttcgtctactccagggtctttcaggaggccaaaaggcagctccagaagattgacaaatctgagggccgcttccatgtccagaaccttagccaggtggagcaggatgggcggacggggcatggactccgcagatcttccaagttctgcttgaaggagcacaaagccctcaagacgttaggcatcatcatgggcactttcaccctctgctggctgcccttcttcatcgttaacattgtgcatgtgatccaggataacctcatccgtaaggaagtttacatcctcctaaattggataggctatgtcaattctggtttcaatccccttatctactgccggagcccagatttcaggattgccttccaggagcttctgtgcctgcgcaggtcttctttgaaggcctattaccgtactcgagagaggagggcccgcttcgtgtccaagaaaggcaactgcaacgtcgcccacaagaacattcgagagcagggccgcttcctgcaggatgtgttcaccacgctggtggacctcaaatggccacacactctgctcattttcaccatgtccttcctgtgcagctggctgctctttgccatggtctggtggctcatcgccttcgcccacggtgatctctatgcttacatggagaaaggcatcacggacctggccccctacccatacgatgtaccagattacgccggagagggcaccaatgtgccctgcgtcacaagcatccactccttttcatctgccttccttttctccatcgaggtccaggtgaccattggtttcggcgggcgcatggtgacagaggaatgtcccctggccatcctcattctcattgtgcagaatatcgtcgggctgatgatcaacgccatcatgctgggctgcatcttcatgaaaacggcccaggcacatcggcgggcagaaaccctcatcttcagcaagcatgctgtgatcaccctgcgccatggccgcctgtgcttcatgctgcgcgtaggggacctccgaaagagcatgatcattagcgccaccatccacatgcaggtggtgcgcaagaccaccagccccgagggcgaagttgtgcctctccaccaggtagacatccccatggagaatggcgtgggtggtaacggcatcttcctggtggccccactcatcatctaccacgtcatcgactccaacagcccgctctacgacctggctcctagtgacctgcaccaccaccaggacctggagatcattgtcatcttggaaggcgtggtagaaaccacgggcatcaccacccaggcccgcacctcctacctagctgacgagattctatgggggcagcgctttgtccccattgtggccgaggaggacggccgctattctgtggactactccaaatttggtaacaccattaaagtgcccacaccactctgcacagcccgccagcttgatgaggaccgcagt

SEQ ID NO: 104 - protein, 699 aa, Artificial sequence
  Synthetic Construct
MGQPGNGSAFLLAPNGSHAPDHDVTQQRDEVWVVGMGIVMSLIVLAIVFGNVLVITAIAKFERLQTVTNYFITSLACADLVMGLAVVPFGAAHILMKMWTFGNFWCEFWTSIDVLCVTASIETLCVIAVDRYFAITSPFKYQSLLTKNKARVIILMVWIVSGLTSFLPIQMHWYRATHQEAINCYANETCCDFFTNQAYAIASSIVSFYVPLVIMVFVYSRVFQEAKRQLQKIDKSEGRFHVQNLSQVEQDGRTGHGLRRSSKFCLKEHKALKTLGIIMGTFTLCWLPFFIVNIVHVIQDNLIRKEVYILLNWIGYVNSGFNPLIYCRSPDFRIAFQELLCLRRSSLKAYYRTRERRARFVSKKGNCNVAHKNIREQGRFLQDVFTTLVDLKWPHTLLIFTMSFLCSWLLFAMVWWLIAFAHGDLYAYMEKGITDLAPYPYDVPDYAGEGTNVPCVTSIHSFSSAFLFSIEVQVTIGFGGRMVTEECPLAILILIVQNIVGLMINAIMLGCIFMKTAQAHRRAETLIFSKHAVITLRHGRLCFMLRVGDLRKSMIISATIHMQVVRKTTSPEGEVVPLHQVDIPMENGVGGNGIFLVAPLIIYHVIDSNSPLYDLAPSDLHHHQDLEIIVILEGVVETTGITTQARTSYLADEILWGQRFVPIVAEEDGRYSVDYSKFGNTIKVPTPLCTARQLDEDRS

SEQ ID NO: 105 - DNA, 2145 bp, Artificial sequence
  hybrid sequence
  CDS (1)..(2145)
atggggcaacccgggaacggcagcgccttcttgctggcacccaatggaagccatgcgccggaccacgacgtcacgcagcaaagggacgaggtgtgggtggtgggcatgggcatcgtcatgtctctcatcgtcctggccatcgtgtttggcaatgtgctggtcatcacagccattgccaagttcgagcgtctgcagacggtcaccaactacttcatcacttcactggcctgtgctgatctggtcatgggcctagcagtggtgccctttggggccgcccatattcttatgaaaatgtggacttttggcaacttctggtgcgagttttggacttccattgatgtgctgtgcgtcacggccagcattgagaccctgtgcgtgatcgcagtggatcgctactttgccattacttcacctttcaagtaccagagcctgctgaccaagaataaggcccgggtgatcattctgatggtgtggattgtgtcaggccttacctccttcttgcccattcagatgcactggtacagggccacccaccaggaagccatcaactgctatgccaatgagacctgctgtgacttcttcacgaaccaagcctatgccattgcctcttccatcgtgtccttctacgttcccctggtgatcatggtcttcgtctactccagggtctttcaggaggccaaaaggcagctccagaagattgacaaatctgagggccgcttccatgtccagaaccttagccaggtggagcaggatgggcggacggggcatggactccgcagatcttccaagttctgcttgaaggagcacaaagccctcaagacgttaggcatcatcatgggcactttcaccctctgctggctgcccttcttcatcgttaacattgtgcatgtgatccaggataacctcatccgtaaggaagtttacatcctcctaaattggataggctatgtcaattctggtttcaatccccttatctactgccggagcccagatttcaggattgccttccaggagcttctgtgcctgcgcaggtcttctttgaaggcctattaccgtactcgagagaggagggcccgcttcgtgtccaagaaaggcaactgcaacgtcgcccacaagaacattcgagagcagggccgcttcctgcaggatgtgttcaccacgctggtggacctcaaatggccacacactctgctcattttcaccatgtccttcctgtgcagctggctgctctttgccatggtctggtggctcatcgccttcgcccacggtgacctggcccccggagagggcaccaatgtgccctgcgtcacaagcatccactccttttcatctgccttccttttctccatcgaggtccaggtgaccattggtttcggcgggcgcatggtgacagaggaatgtcccctggccatcctcattctcattgtgcagaatatcgtcgggctgatgatcaacgccatcatgctgggctgcatcttcatgaaaacggcccaggcacatcggcgggcagaaaccctcatcttcagcaagcatgctgtgatcaccctgcgccatggccgcctgtgcttcatgctgcgcgtaggggacctccgaaagagcatgatcattagcgccaccatccacatgcaggtggtgcgcaagaccaccagccccgagggcgaagttgtgcctctccaccaggtagacatccccatggagaatggcgtgggtggtaacggcatcttcctggtggccccactcatcatctaccacgtcatcgactccaacagcccgctctacgacctggctcctagtgacctgcaccaccaccaggacctggagatcattgtcatcttggaaggcgtggtagaaaccacgggcatcaccacccaggcccgcacctcctacctagctgacgagattctatgggggcagcgctttgtccccattgtggccgaggaggacggccgctattctgtggactactccaaatttggtaacaccattaaagtgcccacaccactctgcacagcccgccagcttgatgaggaccgcagtctgctggatgccctgaccctcgcctcgtcgcgggggcccctgcgcaagcgcagtgtggctgtggcgaaggccaagcccaagtttagcatctctccagattccttgtcc

SEQ ID NO: 106 - protein, 715 aa, Artificial sequence
  Synthetic Construct
MGQPGNGSAFLLAPNGSHAPDHDVTQQRDEVWVVGMGIVMSLIVLAIVFGNVLVITAIAKFERLQTVTNYFITSLACADLVMGLAVVPFGAAHILMKMWTFGNFWCEFWTSIDVLCVTASIETLCVIAVDRYFAITSPFKYQSLLTKNKARVIILMVWIVSGLTSFLPIQMHWYRATHQEAINCYANETCCDFFTNQAYAIASSIVSFYVPLVIMVFVYSRVFQEAKRQLQKIDKSEGRFHVQNLSQVEQDGRTGHGLRRSSKFCLKEHKALKTLGIIMGTFTLCWLPFFIVNIVHVIQDNLIRKEVYILLNWIGYVNSGFNPLIYCRSPDFRIAFQELLCLRRSSLKAYYRTRERRARFVSKKGNCNVAHKNIREQGRFLQDVFTTLVDLKWPHTLLIFTMSFLCSWLLFAMVWWLIAFAHGDLAPGEGTNVPCVTSIHSFSSAFLFSIEVQVTIGFGGRMVTEECPLAILILIVQNIVGLMINAIMLGCIFMKTAQAHRRAETLIFSKHAVITLRHGRLCFMLRVGDLRKSMIISATIHMQVVRKTTSPEGEVVPLHQVDIPMENGVGGNGIFLVAPLIIYHVIDSNSPLYDLAPSDLHHHQDLEIIVILEGVVETTGITTQARTSYLADEILWGQRFVPIVAEEDGRYSVDYSKFGNTIKVPTPLCTARQLDEDRSLLDALTLASSRGPLRKRSVAVAKAKPKFSISPDSLS

SEQ ID NO: 107 - DNA, 2037 bp, Artificial sequence
  hybrid sequence
  CDS (1)..(2037)
atggggcaacccgggaacggcagcgccttcttgctggcacccaatggaagccatgcgccggaccacgacgtcacgcagcaaagggacgaggtgtgggtggtgggcatgggcatcgtcatgtctctcatcgtcctggccatcgtgtttggcaatgtgctggtcatcacagccattgccaagttcgagcgtctgcagacggtcaccaactacttcatcacttcactggcctgtgctgatctggtcatgggcctagcagtggtgccctttggggccgcccatattcttatgaaaatgtggacttttggcaacttctggtgcgagttttggacttccattgatgtgctgtgcgtcacggccagcattgagaccctgtgcgtgatcgcagtggatcgctactttgccattacttcacctttcaagtaccagagcctgctgaccaagaataaggcccgggtgatcattctgatggtgtggattgtgtcaggccttacctccttcttgcccattcagatgcactggtacagggccacccaccaggaagccatcaactgctatgccaatgagacctgctgtgacttcttcacgaaccaagcctatgccattgcctcttccatcgtgtccttctacgttcccctggtgatcatggtcttcgtctactccagggtctttcaggaggccaaaaggcagctccagaagattgacaaatctgagggccgcttccatgtccagaaccttagccaggtggagcaggatgggcggacggggcatggactccgcagatcttccaagttctgcttgaaggagcacaaagccctcaagacgttaggcatcatcatgggcactttcaccctctgctggctgcccttcttcatcgttaacattgtgcatgtgatccaggataacctcatccgtaaggaagtttacatcctcctaaattggataggctatgtcaattctggtttcaatccccttatctactgccggagcccagatttcaggattgccttccaggagcttctgtgcctgcgcaggtcttctttgaaggcctattaccgtactcgagagaggagggcccgcttcgtgtccaagaaaggcaactgcaacgtcgcccacaagaacattcgagagcagggccgcttcctgcaggatgtgttcaccacgctggtggacctcaaatggccacacactctgctcattttcaccatgtccttcctgtgcagctggctgctctttgccatggtctggtggctcatcgccttcgcccacggtgacctggcccccggagagggcaccaatgtgccctgcgtcacaagcatccactccttttcatctgccttccttttctccatcgaggtccaggtgaccattggtttcggcgggcgcatggtgacagaggaatgtcccctggccatcctcattctcattgtgcagaatatcgtcgggctgatgatcaacgccatcatgctgggctgcatcttcatgaaaacggcccaggcacatcggcgggcagaaaccctcatcttcagcaagcatgctgtgatcaccctgcgccatggccgcctgtgcttcatgctgcgcgtaggggacctccgaaagagcatgatcattagcgccaccatccacatgcaggtggtgcgcaagaccaccagccccgagggcgaagttgtgcctctccaccaggtagacatccccatggagaatggcgtgggtggtaacggcatcttcctggtggccccactcatcatctaccacgtcatcgactccaacagcccgctctacgacctggctcctagtgacctgcaccaccaccaggacctggagatcattgtcatcttggaaggcgtggtagaaaccacgggcatcaccacccaggcccgcacctcctacctagctgacgagattctatgggggcagcgctttgtccccattgtggccgaggaggacggccgctattctgtggactactccaaatttggtaacaccattaaagtgcccacaccactctgcacagcccgccagcttgatgaggaccgcagt

SEQ ID NO: 108 - protein, 679 aa, Artificial sequence
  Synthetic Construct
MGQPGNGSAFLLAPNGSHAPDHDVTQQRDEVWVVGMGIVMSLIVLAIVFGNVLVITAIAKFERLQTVTNYFITSLACADLVMGLAVVPFGAAHILMKMWTFGNFWCEFWTSIDVLCVTASIETLCVIAVDRYFAITSPFKYQSLLTKNKARVIILMVWIVSGLTSFLPIQMHWYRATHQEAINCYANETCCDFFTNQAYAIASSIVSFYVPLVIMVFVYSRVFQEAKRQLQKIDKSEGRFHVQNLSQVEQDGRTGHGLRRSSKFCLKEHKALKTLGIIMGTFTLCWLPFFIVNIVHVIQDNLIRKEVYILLNWIGYVNSGFNPLIYCRSPDFRIAFQELLCLRRSSLKAYYRTRERRARFVSKKGNCNVAHKNIREQGRFLQDVFTTLVDLKWPHTLLIFTMSFLCSWLLFAMVWWLIAFAHGDLAPGEGTNVPCVTSIHSFSSAFLFSIEVQVTIGFGGRMVTEECPLAILILIVQNIVGLMINAIMLGCIFMKTAQAHRRAETLIFSKHAVITLRHGRLCFMLRVGDLRKSMIISATIHMQVVRKTTSPEGEVVPLHQVDIPMENGVGGNGIFLVAPLIIYHVIDSNSPLYDLAPSDLHHHQDLEIIVILEGVVETTGITTQARTSYLADEILWGQRFVPIVAEEDGRYSVDYSKFGNTIKVPTPLCTARQLDEDRS

SEQ ID NO: 109 - DNA, 2379 bp, Artificial sequence
  hybrid sequence
  CDS (1)..(2379)
atggggcaacccgggaacggcagcgccttcttgctggcacccaatggaagccatgcgccggaccacgacgtcacgcagcaaagggacgaggtgtgggtggtgggcatgggcatcgtcatgtctctcatcgtcctggccatcgtgtttggcaatgtgctggtcatcacagccattgccaagttcgagcgtctgcagacggtcaccaactacttcatcacttcactggcctgtgctgatctggtcatgggcctagcagtggtgccctttggggccgcccatattcttatgaaaatgtggacttttggcaacttctggtgcgagttttggacttccattgatgtgctgtgcgtcacggccagcattgagaccctgtgcgtgatcgcagtggatcgctactttgccattacttcacctttcaagtaccagagcctgctgaccaagaataaggcccgggtgatcattctgatggtgtggattgtgtcaggccttacctccttcttgcccattcagatgcactggtacagggccacccaccaggaagccatcaactgctatgccaatgagacctgctgtgacttcttcacgaaccaagcctatgccattgcctcttccatcgtgtccttctacgttcccctggtgatcatggtcttcgtctactccagggtctttcaggaggccaaaaggcagctccagaagattgacaaatctgagggccgcttccatgtccagaaccttagccaggtggagcaggatgggcggacggggcatggactccgcagatcttccaagttctgcttgaaggagcacaaagccctcaagacgttaggcatcatcatgggcactttcaccctctgctggctgcccttcttcatcgttaacattgtgcatgtgatccaggataacctcatccgtaaggaagtttacatcctcctaaattggataggctatgtcaattctggtttcaatccccttatctactgccggagcccagatttcaggattgccttccaggagcttctgtgcctgcgcaggtcttctttgaaggcctatggcaatggctactccagcaacggcaacacaggggagcagagtggatatcacgtggaacaggagaaagaaaataaactgctgtgtgaagacctcccaggcacggaagactttgtgggccatcaaggtactgtgcctagcgataacattgattcacaagggaggaattgtagtacaaatgactcactgctaaggagggcccgcttcgtgtccaagaaaggcaactgcaacgtcgcccacaagaacattcgagagcagggccgcttcctgcaggatgtgttcaccacgctggtggacctcaaatggccacacactctgctcattttcaccatgtccttcctgtgcagctggctgctctttgccatggtctggtggctcatcgccttcgcccacggtgatctctatgcttacatggagaaaggcatcacggacctggccccctacccatacgatgtaccagattacgccggagagggcaccaatgtgccctgcgtcacaagcatccactccttttcatctgccttccttttctccatcgaggtccaggtgaccattggtttcggcgggcgcatggtgacagaggaatgtcccctggccatcctcattctcattgtgcagaatatcgtcgggctgatgatcaacgccatcatgctgggctgcatcttcatgaaaacggcccaggcacatcggcgggcagaaaccctcatcttcagcaagcatgctgtgatcaccctgcgccatggccgcctgtgcttcatgctgcgcgtaggggacctccgaaagagcatgatcattagcgccaccatccacatgcaggtggtgcgcaagaccaccagccccgagggcgaagttgtgcctctccaccaggtagacatccccatggagaatggcgtgggtggtaacggcatcttcctggtggccccactcatcatctaccacgtcatcgactccaacagcccgctctacgacctggctcctagtgacctgcaccaccaccaggacctggagatcattgtcatcttggaaggcgtggtagaaaccacgggcatcaccacccaggcccgcacctcctacctagctgacgagattctatgggggcagcgctttgtccccattgtggccgaggaggacggccgctattctgtggactactccaaatttggtaacaccattaaagtgcccacaccactctgcacagcccgccagcttgatgaggaccgcagtctgctggatgccctgaccctcgcctcgtcgcgggggcccctgcgcaagcgcagtgtggctgtggcgaaggccaagcccaagtttagcatctctccagattccttgtcc

SEQ ID NO: 110 - protein, 793 aa, Artificial sequence
  Synthetic Construct
MGQPGNGSAFLLAPNGSHAPDHDVTQQRDEVWVVGMGIVMSLIVLAIVFGNVLVITAIAKFERLQTVTNYFITSLACADLVMGLAVVPFGAAHILMKMWTFGNFWCEFWTSIDVLCVTASIETLCVIAVDRYFAITSPFKYQSLLTKNKARVIILMVWIVSGLTSFLPIQMHWYRATHQEAINCYANETCCDFFTNQAYAIASSIVSFYVPLVIMVFVYSRVFQEAKRQLQKIDKSEGRFHVQNLSQVEQDGRTGHGLRRSSKFCLKEHKALKTLGIIMGTFTLCWLPFFIVNIVHVIQDNLIRKEVYILLNWIGYVNSGFNPLIYCRSPDFRIAFQELLCLRRSSLKAYGNGYSSNGNTGEQSGYHVEQEKENKLLCEDLPGTEDFVGHQGTVPSDNIDSQGRNCSTNDSLLRRARFVSKKGNCNVAHKNIREQGRFLQDVFTTLVDLKWPHTLLIFTMSFLCSWLLFAMVWWLIAFAHGDLYAYMEKGITDLAPYPYDVPDYAGEGTNVPCVTSIHSFSSAFLFSIEVQVTIGFGGRMVTEECPLAILILIVQNIVGLMINAIMLGCIFMKTAQAHRRAETLIFSKHAVITLRHGRLCFMLRVGDLRKSMIISATIHMQVVRKTTSPEGEVVPLHQVDIPMENGVGGNGIFLVAPLIIYHVIDSNSPLYDLAPSDLHHHQDLEIIVILEGVVETTGITTQARTSYLADEILWGQRFVPIVAEEDGRYSVDYSKFGNTIKVPTPLCTARQLDEDRSLLDALTLASSRGPLRKRSVAVAKAKPKFSISPDSLS

SEQ ID NO: 111 - DNA, 2271 bp, Artificial sequence
  hybrid sequence
  CDS (1)..(2271)
atggggcaacccgggaacggcagcgccttcttgctggcacccaatggaagccatgcgccggaccacgacgtcacgcagcaaagggacgaggtgtgggtggtgggcatgggcatcgtcatgtctctcatcgtcctggccatcgtgtttggcaatgtgctggtcatcacagccattgccaagttcgagcgtctgcagacggtcaccaactacttcatcacttcactggcctgtgctgatctggtcatgggcctagcagtggtgccctttggggccgcccatattcttatgaaaatgtggacttttggcaacttctggtgcgagttttggacttccattgatgtgctgtgcgtcacggccagcattgagaccctgtgcgtgatcgcagtggatcgctactttgccattacttcacctttcaagtaccagagcctgctgaccaagaataaggcccgggtgatcattctgatggtgtggattgtgtcaggccttacctccttcttgcccattcagatgcactggtacagggccacccaccaggaagccatcaactgctatgccaatgagacctgctgtgacttcttcacgaaccaagcctatgccattgcctcttccatcgtgtccttctacgttcccctggtgatcatggtcttcgtctactccagggtctttcaggaggccaaaaggcagctccagaagattgacaaatctgagggccgcttccatgtccagaaccttagccaggtggagcaggatgggcggacggggcatggactccgcagatcttccaagttctgcttgaaggagcacaaagccctcaagacgttaggcatcatcatgggcactttcaccctctgctggctgcccttcttcatcgttaacattgtgcatgtgatccaggataacctcatccgtaaggaagtttacatcctcctaaattggataggctatgtcaattctggtttcaatccccttatctactgccggagcccagatttcaggattgccttccaggagcttctgtgcctgcgcaggtcttctttgaaggcctatggcaatggctactccagcaacggcaacacaggggagcagagtggatatcacgtggaacaggagaaagaaaataaactgctgtgtgaagacctcccaggcacggaagactttgtgggccatcaaggtactgtgcctagcgataacattgattcacaagggaggaattgtagtacaaatgactcactgctaaggagggcccgcttcgtgtccaagaaaggcaactgcaacgtcgcccacaagaacattcgagagcagggccgcttcctgcaggatgtgttcaccacgctggtggacctcaaatggccacacactctgctcattttcaccatgtccttcctgtgcagctggctgctctttgccatggtctggtggctcatcgccttcgcccacggtgatctctatgcttacatggagaaaggcatcacggacctggccccctacccatacgatgtaccagattacgccggagagggcaccaatgtgccctgcgtcacaagcatccactccttttcatctgccttccttttctccatcgaggtccaggtgaccattggtttcggcgggcgcatggtgacagaggaatgtcccctggccatcctcattctcattgtgcagaatatcgtcgggctgatgatcaacgccatcatgctgggctgcatcttcatgaaaacggcccaggcacatcggcgggcagaaaccctcatcttcagcaagcatgctgtgatcaccctgcgccatggccgcctgtgcttcatgctgcgcgtaggggacctccgaaagagcatgatcattagcgccaccatccacatgcaggtggtgcgcaagaccaccagccccgagggcgaagttgtgcctctccaccaggtagacatccccatggagaatggcgtgggtggtaacggcatcttcctggtggccccactcatcatctaccacgtcatcgactccaacagcccgctctacgacctggctcctagtgacctgcaccaccaccaggacctggagatcattgtcatcttggaaggcgtggtagaaaccacgggcatcaccacccaggcccgcacctcctacctagctgacgagattctatgggggcagcgctttgtccccattgtggccgaggaggacggccgctattctgtggactactccaaatttggtaacaccattaaagtgcccacaccactctgcacagcccgccagcttgatgaggaccgcagt

SEQ ID NO: 112 - protein, 757 aa, Artificial sequence
  Synthetic Construct
MGQPGNGSAFLLAPNGSHAPDHDVTQQRDEVWVVGMGIVMSLIVLAIVFGNVLVITAIAKFERLQTVTNYFITSLACADLVMGLAVVPFGAAHILMKMWTFGNFWCEFWTSIDVLCVTASIETLCVIAVDRYFAITSPFKYQSLLTKNKARVIILMVWIVSGLTSFLPIQMHWYRATHQEAINCYANETCCDFFTNQAYAIASSIVSFYVPLVIMVFVYSRVFQEAKRQLQKIDKSEGRFHVQNLSQVEQDGRTGHGLRRSSKFCLKEHKALKTLGIIMGTFTLCWLPFFIVNIVHVIQDNLIRKEVYILLNWIGYVNSGFNPLIYCRSPDFRIAFQELLCLRRSSLKAYGNGYSSNGNTGEQSGYHVEQEKENKLLCEDLPGTEDFVGHQGTVPSDNIDSQGRNCSTNDSLLRRARFVSKKGNCNVAHKNIREQGRFLQDVFTTLVDLKWPHTLLIFTMSFLCSWLLFAMVWWLIAFAHGDLYAYMEKGITDLAPYPYDVPDYAGEGTNVPCVTSIHSFSSAFLFSIEVQVTIGFGGRMVTEECPLAILILIVQNIVGLMINAIMLGCIFMKTAQAHRRAETLIFSKHAVITLRHGRLCFMLRVGDLRKSMIISATIHMQVVRKTTSPEGEVVPLHQVDIPMENGVGGNGIFLVAPLIIYHVIDSNSPLYDLAPSDLHHHQDLEIIVILEGVVETTGITTQARTSYLADEILWGQRFVPIVAEEDGRYSVDYSKFGNTIKVPTPLCTARQLDEDRS

SEQ ID NO: 113 - DNA, 2319 bp, Artificial sequence
  hybrid sequence
  CDS (1)..(2319)
atggggcaacccgggaacggcagcgccttcttgctggcacccaatggaagccatgcgccggaccacgacgtcacgcagcaaagggacgaggtgtgggtggtgggcatgggcatcgtcatgtctctcatcgtcctggccatcgtgtttggcaatgtgctggtcatcacagccattgccaagttcgagcgtctgcagacggtcaccaactacttcatcacttcactggcctgtgctgatctggtcatgggcctagcagtggtgccctttggggccgcccatattcttatgaaaatgtggacttttggcaacttctggtgcgagttttggacttccattgatgtgctgtgcgtcacggccagcattgagaccctgtgcgtgatcgcagtggatcgctactttgccattacttcacctttcaagtaccagagcctgctgaccaagaataaggcccgggtgatcattctgatggtgtggattgtgtcaggccttacctccttcttgcccattcagatgcactggtacagggccacccaccaggaagccatcaactgctatgccaatgagacctgctgtgacttcttcacgaaccaagcctatgccattgcctcttccatcgtgtccttctacgttcccctggtgatcatggtcttcgtctactccagggtctttcaggaggccaaaaggcagctccagaagattgacaaatctgagggccgcttccatgtccagaaccttagccaggtggagcaggatgggcggacggggcatggactccgcagatcttccaagttctgcttgaaggagcacaaagccctcaagacgttaggcatcatcatgggcactttcaccctctgctggctgcccttcttcatcgttaacattgtgcatgtgatccaggataacctcatccgtaaggaagtttacatcctcctaaattggataggctatgtcaattctggtttcaatccccttatctactgccggagcccagatttcaggattgccttccaggagcttctgtgcctgcgcaggtcttctttgaaggcctatggcaatggctactccagcaacggcaacacaggggagcagagtggatatcacgtggaacaggagaaagaaaataaactgctgtgtgaagacctcccaggcacggaagactttgtgggccatcaaggtactgtgcctagcgataacattgattcacaagggaggaattgtagtacaaatgactcactgctaaggagggcccgcttcgtgtccaagaaaggcaactgcaacgtcgcccacaagaacattcgagagcagggccgcttcctgcaggatgtgttcaccacgctggtggacctcaaatggccacacactctgctcattttcaccatgtccttcctgtgcagctggctgctctttgccatggtctggtggctcatcgccttcgcccacggtgacctggcccccggagagggcaccaatgtgccctgcgtcacaagcatccactccttttcatctgccttccttttctccatcgaggtccaggtgaccattggtttcggcgggcgcatggtgacagaggaatgtcccctggccatcctcattctcattgtgcagaatatcgtcgggctgatgatcaacgccatcatgctgggctgcatcttcatgaaaacggcccaggcacatcggcgggcagaaaccctcatcttcagcaagcatgctgtgatcaccctgcgccatggccgcctgtgcttcatgctgcgcgtaggggacctccgaaagagcatgatcattagcgccaccatccacatgcaggtggtgcgcaagaccaccagccccgagggcgaagttgtgcctctccaccaggtagacatccccatggagaatggcgtgggtggtaacggcatcttcctggtggccccactcatcatctaccacgtcatcgactccaacagcccgctctacgacctggctcctagtgacctgcaccaccaccaggacctggagatcattgtcatcttggaaggcgtggtagaaaccacgggcatcaccacccaggcccgcacctcctacctagctgacgagattctatgggggcagcgctttgtccccattgtggccgaggaggacggccgctattctgtggactactccaaatttggtaacaccattaaagtgcccacaccactctgcacagcccgccagcttgatgaggaccgcagtctgctggatgccctgaccctcgcctcgtcgcgggggcccctgcgcaagcgcagtgtggctgtggcgaaggccaagcccaagtttagcatctctccagattccttgtcc

SEQ ID NO: 114 - protein, 773 aa, Artificial sequence
  Synthetic Construct
MGQPGNGSAFLLAPNGSHAPDHDVTQQRDEVWVVGMGIVMSLIVLAIVFGNVLVITAIAKFERLQTVTNYFITSLACADLVMGLAVVPFGAAHILMKMWTFGNFWCEFWTSIDVLCVTASIETLCVIAVDRYFAITSPFKYQSLLTKNKARVIILMVWIVSGLTSFLPIQMHWYRATHQEAINCYANETCCDFFTNQAYAIASSIVSFYVPLVIMVFVYSRVFQEAKRQLQKIDKSEGRFHVQNLSQVEQDGRTGHGLRRSSKFCLKEHKALKTLGIIMGTFTLCWLPFFIVNIVHVIQDNLIRKEVYILLNWIGYVNSGFNPLIYCRSPDFRIAFQELLCLRRSSLKAYGNGYSSNGNTGEQSGYHVEQEKENKLLCEDLPGTEDFVGHQGTVPSDNIDSQGRNCSTNDSLLRRARFVSKKGNCNVAHKNIREQGRFLQDVFTTLVDLKWPHTLLIFTMSFLCSWLLFAMVWWLIAFAHGDLAPGEGTNVPCVTSIHSFSSAFLFSIEVQVTIGFGGRMVTEECPLAILILIVQNIVGLMINAIMLGCIFMKTAQAHRRAETLIFSKHAVITLRHGRLCFMLRVGDLRKSMIISATIHMQVVRKTTSPEGEVVPLHQVDIPMENGVGGNGIFLVAPLIIYHVIDSNSPLYDLAPSDLHHHQDLEIIVILEGVVETTGITTQARTSYLADEILWGQRFVPIVAEEDGRYSVDYSKFGNTIKVPTPLCTARQLDEDRSLLDALTLASSRGPLRKRSVAVAKAKPKFSISPDSLS

SEQ ID NO: 115 - DNA, 2211 bp, Artificial sequence
  hybrid sequence
  CDS (1)..(2211)
atggggcaacccgggaacggcagcgccttcttgctggcacccaatggaagccatgcgccggaccacgacgtcacgcagcaaagggacgaggtgtgggtggtgggcatgggcatcgtcatgtctctcatcgtcctggccatcgtgtttggcaatgtgctggtcatcacagccattgccaagttcgagcgtctgcagacggtcaccaactacttcatcacttcactggcctgtgctgatctggtcatgggcctagcagtggtgccctttggggccgcccatattcttatgaaaatgtggacttttggcaacttctggtgcgagttttggacttccattgatgtgctgtgcgtcacggccagcattgagaccctgtgcgtgatcgcagtggatcgctactttgccattacttcacctttcaagtaccagagcctgctgaccaagaataaggcccgggtgatcattctgatggtgtggattgtgtcaggccttacctccttcttgcccattcagatgcactggtacagggccacccaccaggaagccatcaactgctatgccaatgagacctgctgtgacttcttcacgaaccaagcctatgccattgcctcttccatcgtgtccttctacgttcccctggtgatcatggtcttcgtctactccagggtctttcaggaggccaaaaggcagctccagaagattgacaaatctgagggccgcttccatgtccagaaccttagccaggtggagcaggatgggcggacggggcatggactccgcagatcttccaagttctgcttgaaggagcacaaagccctcaagacgttaggcatcatcatgggcactttcaccctctgctggctgcccttcttcatcgttaacattgtgcatgtgatccaggataacctcatccgtaaggaagtttacatcctcctaaattggataggctatgtcaattctggtttcaatccccttatctactgccggagcccagatttcaggattgccttccaggagcttctgtgcctgcgcaggtcttctttgaaggcctatggcaatggctactccagcaacggcaacacaggggagcagagtggatatcacgtggaacaggagaaagaaaataaactgctgtgtgaagacctcccaggcacggaagactttgtgggccatcaaggtactgtgcctagcgataacattgattcacaagggaggaattgtagtacaaatgactcactgctaaggagggcccgcttcgtgtccaagaaaggcaactgcaacgtcgcccacaagaacattcgagagcagggccgcttcctgcaggatgtgttcaccacgctggtggacctcaaatggccacacactctgctcattttcaccatgtccttcctgtgcagctggctgctctttgccatggtctggtggctcatcgccttcgcccacggtgacctggcccccggagagggcaccaatgtgccctgcgtcacaagcatccactccttttcatctgccttccttttctccatcgaggtccaggtgaccattggtttcggcgggcgcatggtgacagaggaatgtcccctggccatcctcattctcattgtgcagaatatcgtcgggctgatgatcaacgccatcatgctgggctgcatcttcatgaaaacggcccaggcacatcggcgggcagaaaccctcatcttcagcaagcatgctgtgatcaccctgcgccatggccgcctgtgcttcatgctgcgcgtaggggacctccgaaagagcatgatcattagcgccaccatccacatgcaggtggtgcgcaagaccaccagccccgagggcgaagttgtgcctctccaccaggtagacatccccatggagaatggcgtgggtggtaacggcatcttcctggtggccccactcatcatctaccacgtcatcgactccaacagcccgctctacgacctggctcctagtgacctgcaccaccaccaggacctggagatcattgtcatcttggaaggcgtggtagaaaccacgggcatcaccacccaggcccgcacctcctacctagctgacgagattctatgggggcagcgctttgtccccattgtggccgaggaggacggccgctattctgtggactactccaaatttggtaacaccattaaagtgcccacaccactctgcacagcccgccagcttgatgaggaccgcagt

SEQ ID NO: 116 - protein, 737 aa, Artificial sequence
  Synthetic Construct
MGQPGNGSAFLLAPNGSHAPDHDVTQQRDEVWVVGMGIVMSLIVLAIVFGNVLVITAIAKFERLQTVTNYFITSLACADLVMGLAVVPFGAAHILMKMWTFGNFWCEFWTSIDVLCVTASIETLCVIAVDRYFAITSPFKYQSLLTKNKARVIILMVWIVSGLTSFLPIQMHWYRATHQEAINCYANETCCDFFTNQAYAIASSIVSFYVPLVIMVFVYSRVFQEAKRQLQKIDKSEGRFHVQNLSQVEQDGRTGHGLRRSSKFCLKEHKALKTLGIIMGTFTLCWLPFFIVNIVHVIQDNLIRKEVYILLNWIGYVNSGFNPLIYCRSPDFRIAFQELLCLRRSSLKAYGNGYSSNGNTGEQSGYHVEQEKENKLLCEDLPGTEDFVGHQGTVPSDNIDSQGRNCSTNDSLLRRARFVSKKGNCNVAHKNIREQGRFLQDVFTTLVDLKWPHTLLIFTMSFLCSWLLFAMVWWLIAFAHGDLAPGEGTNVPCVTSIHSFSSAFLFSIEVQVTIGFGGRMVTEECPLAILILIVQNIVGLMINAIMLGCIFMKTAQAHRRAETLIFSKHAVITLRHGRLCFMLRVGDLRKSMIISATIHMQVVRKTTSPEGEVVPLHQVDIPMENGVGGNGIFLVAPLIIYHVIDSNSPLYDLAPSDLHHHQDLEIIVILEGVVETTGITTQARTSYLADEILWGQRFVPIVAEEDGRYSVDYSKFGNTIKVPTPLCTARQLDEDRS

SEQ ID NO: 117 - DNA, 2421 bp, Artificial sequence
  hybrid sequence
  CDS (1)..(2421)
atggatgtgctcagccctggtcagggcaacaacaccacatcaccaccggctccctttgagaccggcggcaacactactggtatctccgacgtgaccgtcagctaccaagtgatcacctctctgctgctgggcacgctcatcttctgcgcggtgctgggcaatgcgtgcgtggtggctgccatcgccttggagcgctccctgcagaacgtggccaattatcttattggctctttggcggtcaccgacctcatggtgtcggtgttggtgctgcccatggccgcgctgtatcaggtgctcaacaagtggacactgggccaggtaacctgcgacctgttcatcgccctcgacgtgctgtgctgcacctcatccatcttgcacctgtgcgccatcgcgctggacaggtactgggccatcacggaccccatcgactacgtgaacaagaggacgccccggcgcgccgctgcgctcatctcgctcacttggcttattggcttcctcatctctatcccgcccatgctgggctggcgcaccccggaagaccgctcggaccccgacgcatgcaccattagcaaggatcatggctacactatctattccacctttggagctttctacatcccgctgctgctcatgctggttctctatgggcgcatattccgagctgcgcgcttccgcatccgcaagacggtcaaaaaggtggagaagaccggagcggacacccgccatggagcatctcccgccccgcagcccaagaagagtgtgaatggagagtcggggagcaggaactggaggctgggcgtggagagcaaggctgggggtgctctgtgcgccaatggcgcggtgaggcaaggtgacgatggcgccgccctggaggtgatcgaggtgcaccgagtgggcaactccaaagagcacttgcctctgcccagcgaggctggtcctaccccttgtgcccccgcctctttcgagaggaaaaatgagcgcaacgccgaggcgaagcgcaagatggccctggcccgagagaggaagacagtgaagacgctgggcatcatcatgggcaccttcatcctctgctggctgcccttcttcatcgtggctcttgttctgcccttctgcgagagcagctgccacatgcccaccctgttgggcgccataatcaattggctgggctactccaactctctgcttaaccccgtcatttacgcatacttcaacaaggactttcaaaacgcgtttaagaagatcattaagtgtaagttctgccgccagtaccgtactcgagagaggagggcccgcttcgtgtccaagaaaggcaactgcaacgtcgcccacaagaacattcgagagcagggccgcttcctgcaggatgtgttcaccacgctggtggacctcaaatggccacacactctgctcattttcaccatgtccttcctgtgcagctggctgctctttgccatggtctggtggctcatcgccttcgcccacggtgatctctatgcttacatggagaaaggcatcacggacctggccccctacccatacgatgtaccagattacgccggagagggcaccaatgtgccctgcgtcacaagcatccactccttttcatctgccttccttttctccatcgaggtccaggtgaccattggtttcggcgggcgcatggtgacagaggaatgtcccctggccatcctcattctcattgtgcagaatatcgtcgggctgatgatcaacgccatcatgctgggctgcatcttcatgaaaacggcccaggcacatcggcgggcagaaaccctcatcttcagcaagcatgctgtgatcaccctgcgccatggccgcctgtgcttcatgctgcgcgtaggggacctccgaaagagcatgatcattagcgccaccatccacatgcaggtggtgcgcaagaccaccagccccgagggcgaagttgtgcctctccaccaggtagacatccccatggagaatggcgtgggtggtaacggcatcttcctggtggccccactcatcatctaccacgtcatcgactccaacagcccgctctacgacctggctcctagtgacctgcaccaccaccaggacctggagatcattgtcatcttggaaggcgtggtagaaaccacgggcatcaccacccaggcccgcacctcctacctagctgacgagattctatgggggcagcgctttgtccccattgtggccgaggaggacggccgctattctgtggactactccaaatttggtaacaccattaaagtgcccacaccactctgcacagcccgccagcttgatgaggaccgcagtctgctggatgccctgaccctcgcctcgtcgcgggggcccctgcgcaagcgcagtgtggctgtggcgaaggccaagcccaagtttagcatctctccagattccttgtcc

SEQ ID NO: 118 - protein, 807 aa, Artificial sequence
  Synthetic Construct
MDVLSPGQGNNTTSPPAPFETGGNTTGISDVTVSYQVITSLLLGTLIFCAVLGNACVVAAIALERSLQNVANYLIGSLAVTDLMVSVLVLPMAALYQVLNKWTLGQVTCDLFIALDVLCCTSSILHLCAIALDRYWAITDPIDYVNKRTPRRAAALISLTWLIGFLISIPPMLGWRTPEDRSDPDACTISKDHGYTIYSTFGAFYIPLLLMLVLYGRIFRAARFRIRKTVKKVEKTGADTRHGASPAPQPKKSVNGESGSRNWRLGVESKAGGALCANGAVRQGDDGAALEVIEVHRVGNSKEHLPLPSEAGPTPCAPASFERKNERNAEAKRKMALARERKTVKTLGIIMGTFILCWLPFFIVALVLPFCESSCHMPTLLGAIINWLGYSNSLLNPVIYAYFNKDFQNAFKKIIKCKFCRQYRTRERRARFVSKKGNCNVAHKNIREQGRFLQDVFTTLVDLKWPHTLLIFTMSFLCSWLLFAMVWWLIAFAHGDLYAYMEKGITDLAPYPYDVPDYAGEGTNVPCVTSIHSFSSAFLFSIEVQVTIGFGGRMVTEECPLAILILIVQNIVGLMINAIMLGCIFMKTAQAHRRAETLIFSKHAVITLRHGRLCFMLRVGDLRKSMIISATIHMQVVRKTTSPEGEVVPLHQVDIPMENGVGGNGIFLVAPLIIYHVIDSNSPLYDLAPSDLHHHQDLEIIVILEGVVETTGITTQARTSYLADEILWGQRFVPIVAEEDGRYSVDYSKFGNTIKVPTPLCTARQLDEDRSLLDALTLASSRGPLRKRSVAVAKAKPKFSISPDSLS

SEQ ID NO: 119 - DNA, 2313 bp, Artificial sequence
  hybrid sequence
  CDS (1)..(2313)
atggatgtgctcagccctggtcagggcaacaacaccacatcaccaccggctccctttgagaccggcggcaacactactggtatctccgacgtgaccgtcagctaccaagtgatcacctctctgctgctgggcacgctcatcttctgcgcggtgctgggcaatgcgtgcgtggtggctgccatcgccttggagcgctccctgcagaacgtggccaattatcttattggctctttggcggtcaccgacctcatggtgtcggtgttggtgctgcccatggccgcgctgtatcaggtgctcaacaagtggacactgggccaggtaacctgcgacctgttcatcgccctcgacgtgctgtgctgcacctcatccatcttgcacctgtgcgccatcgcgctggacaggtactgggccatcacggaccccatcgactacgtgaacaagaggacgccccggcgcgccgctgcgctcatctcgctcacttggcttattggcttcctcatctctatcccgcccatgctgggctggcgcaccccggaagaccgctcggaccccgacgcatgcaccattagcaaggatcatggctacactatctattccacctttggagctttctacatcccgctgctgctcatgctggttctctatgggcgcatattccgagctgcgcgcttccgcatccgcaagacggtcaaaaaggtggagaagaccggagcggacacccgccatggagcatctcccgccccgcagcccaagaagagtgtgaatggagagtcggggagcaggaactggaggctgggcgtggagagcaaggctgggggtgctctgtgcgccaatggcgcggtgaggcaaggtgacgatggcgccgccctggaggtgatcgaggtgcaccgagtgggcaactccaaagagcacttgcctctgcccagcgaggctggtcctaccccttgtgcccccgcctctttcgagaggaaaaatgagcgcaacgccgaggcgaagcgcaagatggccctggcccgagagaggaagacagtgaagacgctgggcatcatcatgggcaccttcatcctctgctggctgcccttcttcatcgtggctcttgttctgcccttctgcgagagcagctgccacatgcccaccctgttgggcgccataatcaattggctgggctactccaactctctgcttaaccccgtcatttacgcatacttcaacaaggactttcaaaacgcgtttaagaagatcattaagtgtaagttctgccgccagtaccgtactcgagagaggagggcccgcttcgtgtccaagaaaggcaactgcaacgtcgcccacaagaacattcgagagcagggccgcttcctgcaggatgtgttcaccacgctggtggacctcaaatggccacacactctgctcattttcaccatgtccttcctgtgcagctggctgctctttgccatggtctggtggctcatcgccttcgcccacggtgatctctatgcttacatggagaaaggcatcacggacctggccccctacccatacgatgtaccagattacgccggagagggcaccaatgtgccctgcgtcacaagcatccactccttttcatctgccttccttttctccatcgaggtccaggtgaccattggtttcggcgggcgcatggtgacagaggaatgtcccctggccatcctcattctcattgtgcagaatatcgtcgggctgatgatcaacgccatcatgctgggctgcatcttcatgaaaacggcccaggcacatcggcgggcagaaaccctcatcttcagcaagcatgctgtgatcaccctgcgccatggccgcctgtgcttcatgctgcgcgtaggggacctccgaaagagcatgatcattagcgccaccatccacatgcaggtggtgcgcaagaccaccagccccgagggcgaagttgtgcctctccaccaggtagacatccccatggagaatggcgtgggtggtaacggcatcttcctggtggccccactcatcatctaccacgtcatcgactccaacagcccgctctacgacctggctcctagtgacctgcaccaccaccaggacctggagatcattgtcatcttggaaggcgtggtagaaaccacgggcatcaccacccaggcccgcacctcctacctagctgacgagattctatgggggcagcgctttgtccccattgtggccgaggaggacggccgctattctgtggactactccaaatttggtaacaccattaaagtgcccacaccactctgcacagcccgccagcttgatgaggaccgcagt

SEQ ID NO: 120 - protein, 771 aa, Artificial sequence
  Synthetic Construct
MDVLSPGQGNNTTSPPAPFETGGNTTGISDVTVSYQVITSLLLGTLIFCAVLGNACVVAAIALERSLQNVANYLIGSLAVTDLMVSVLVLPMAALYQVLNKWTLGQVTCDLFIALDVLCCTSSILHLCAIALDRYWAITDPIDYVNKRTPRRAAALISLTWLIGFLISIPPMLGWRTPEDRSDPDACTISKDHGYTIYSTFGAFYIPLLLMLVLYGRIFRAARFRIRKTVKKVEKTGADTRHGASPAPQPKKSVNGESGSRNWRLGVESKAGGALCANGAVRQGDDGAALEVIEVHRVGNSKEHLPLPSEAGPTPCAPASFERKNERNAEAKRKMALARERKTVKTLGIIMGTFILCWLPFFIVALVLPFCESSCHMPTLLGAIINWLGYSNSLLNPVIYAYFNKDFQNAFKKIIKCKFCRQYRTRERRARFVSKKGNCNVAHKNIREQGRFLQDVFTTLVDLKWPHTLLIFTMSFLCSWLLFAMVWWLIAFAHGDLYAYMEKGITDLAPYPYDVPDYAGEGTNVPCVTSIHSFSSAFLFSIEVQVTIGFGGRMVTEECPLAILILIVQNIVGLMINAIMLGCIFMKTAQAHRRAETLIFSKHAVITLRHGRLCFMLRVGDLRKSMIISATIHMQVVRKTTSPEGEVVPLHQVDIPMENGVGGNGIFLVAPLIIYHVIDSNSPLYDLAPSDLHHHQDLEIIVILEGVVETTGITTQARTSYLADEILWGQRFVPIVAEEDGRYSVDYSKFGNTIKVPTPLCTARQLDEDRS

SEQ ID NO: 121 - DNA, 2361 bp, Artificial sequence
  hybrid sequence
  CDS (1)..(2361)
atggatgtgctcagccctggtcagggcaacaacaccacatcaccaccggctccctttgagaccggcggcaacactactggtatctccgacgtgaccgtcagctaccaagtgatcacctctctgctgctgggcacgctcatcttctgcgcggtgctgggcaatgcgtgcgtggtggctgccatcgccttggagcgctccctgcagaacgtggccaattatcttattggctctttggcggtcaccgacctcatggtgtcggtgttggtgctgcccatggccgcgctgtatcaggtgctcaacaagtggacactgggccaggtaacctgcgacctgttcatcgccctcgacgtgctgtgctgcacctcatccatcttgcacctgtgcgccatcgcgctggacaggtactgggccatcacggaccccatcgactacgtgaacaagaggacgccccggcgcgccgctgcgctcatctcgctcacttggcttattggcttcctcatctctatcccgcccatgctgggctggcgcaccccggaagaccgctcggaccccgacgcatgcaccattagcaaggatcatggctacactatctattccacctttggagctttctacatcccgctgctgctcatgctggttctctatgggcgcatattccgagctgcgcgcttccgcatccgcaagacggtcaaaaaggtggagaagaccggagcggacacccgccatggagcatctcccgccccgcagcccaagaagagtgtgaatggagagtcggggagcaggaactggaggctgggcgtggagagcaaggctgggggtgctctgtgcgccaatggcgcggtgaggcaaggtgacgatggcgccgccctggaggtgatcgaggtgcaccgagtgggcaactccaaagagcacttgcctctgcccagcgaggctggtcctaccccttgtgcccccgcctctttcgagaggaaaaatgagcgcaacgccgaggcgaagcgcaagatggccctggcccgagagaggaagacagtgaagacgctgggcatcatcatgggcaccttcatcctctgctggctgcccttcttcatcgtggctcttgttctgcccttctgcgagagcagctgccacatgcccaccctgttgggcgccataatcaattggctgggctactccaactctctgcttaaccccgtcatttacgcatacttcaacaaggactttcaaaacgcgtttaagaagatcattaagtgtaagttctgccgccagtaccgtactcgagagaggagggcccgcttcgtgtccaagaaaggcaactgcaacgtcgcccacaagaacattcgagagcagggccgcttcctgcaggatgtgttcaccacgctggtggacctcaaatggccacacactctgctcattttcaccatgtccttcctgtgcagctggctgctctttgccatggtctggtggctcatcgccttcgcccacggtgacctggcccccggagagggcaccaatgtgccctgcgtcacaagcatccactccttttcatctgccttccttttctccatcgaggtccaggtgaccattggtttcggcgggcgcatggtgacagaggaatgtcccctggccatcctcattctcattgtgcagaatatcgtcgggctgatgatcaacgccatcatgctgggctgcatcttcatgaaaacggcccaggcacatcggcgggcagaaaccctcatcttcagcaagcatgctgtgatcaccctgcgccatggccgcctgtgcttcatgctgcgcgtaggggacctccgaaagagcatgatcattagcgccaccatccacatgcaggtggtgcgcaagaccaccagccccgagggcgaagttgtgcctctccaccaggtagacatccccatggagaatggcgtgggtggtaacggcatcttcctggtggccccactcatcatctaccacgtcatcgactccaacagcccgctctacgacctggctcctagtgacctgcaccaccaccaggacctggagatcattgtcatcttggaaggcgtggtagaaaccacgggcatcaccacccaggcccgcacctcctacctagctgacgagattctatgggggcagcgctttgtccccattgtggccgaggaggacggccgctattctgtggactactccaaatttggtaacaccattaaagtgcccacaccactctgcacagcccgccagcttgatgaggaccgcagtctgctggatgccctgaccctcgcctcgtcgcgggggcccctgcgcaagcgcagtgtggctgtggcgaaggccaagcccaagtttagcatctctccagattccttgtcc

SEQ ID NO: 122 - protein, 787 aa, Artificial sequence
  Synthetic Construct
MDVLSPGQGNNTTSPPAPFETGGNTTGISDVTVSYQVITSLLLGTLIFCAVLGNACVVAAIALERSLQNVANYLIGSLAVTDLMVSVLVLPMAALYQVLNKWTLGQVTCDLFIALDVLCCTSSILHLCAIALDRYWAITDPIDYVNKRTPRRAAALISLTWLIGFLISIPPMLGWRTPEDRSDPDACTISKDHGYTIYSTFGAFYIPLLLMLVLYGRIFRAARFRIRKTVKKVEKTGADTRHGASPAPQPKKSVNGESGSRNWRLGVESKAGGALCANGAVRQGDDGAALEVIEVHRVGNSKEHLPLPSEAGPTPCAPASFERKNERNAEAKRKMALARERKTVKTLGIIMGTFILCWLPFFIVALVLPFCESSCHMPTLLGAIINWLGYSNSLLNPVIYAYFNKDFQNAFKKIIKCKFCRQYRTRERRARFVSKKGNCNVAHKNIREQGRFLQDVFTTLVDLKWPHTLLIFTMSFLCSWLLFAMVWWLIAFAHGDLAPGEGTNVPCVTSIHSFSSAFLFSIEVQVTIGFGGRMVTEECPLAILILIVQNIVGLMINAIMLGCIFMKTAQAHRRAETLIFSKHAVITLRHGRLCFMLRVGDLRKSMIISATIHMQVVRKTTSPEGEVVPLHQVDIPMENGVGGNGIFLVAPLIIYHVIDSNSPLYDLAPSDLHHHQDLEIIVILEGVVETTGITTQARTSYLADEILWGQRFVPIVAEEDGRYSVDYSKFGNTIKVPTPLCTARQLDEDRSLLDALTLASSRGPLRKRSVAVAKAKPKFSISPDSLS

SEQ ID NO: 123 - DNA, 2253 bp, Artificial sequence
  hybrid sequence
  CDS (1)..(2253)
atggatgtgctcagccctggtcagggcaacaacaccacatcaccaccggctccctttgagaccggcggcaacactactggtatctccgacgtgaccgtcagctaccaagtgatcacctctctgctgctgggcacgctcatcttctgcgcggtgctgggcaatgcgtgcgtggtggctgccatcgccttggagcgctccctgcagaacgtggccaattatcttattggctctttggcggtcaccgacctcatggtgtcggtgttggtgctgcccatggccgcgctgtatcaggtgctcaacaagtggacactgggccaggtaacctgcgacctgttcatcgccctcgacgtgctgtgctgcacctcatccatcttgcacctgtgcgccatcgcgctggacaggtactgggccatcacggaccccatcgactacgtgaacaagaggacgccccggcgcgccgctgcgctcatctcgctcacttggcttattggcttcctcatctctatcccgcccatgctgggctggcgcaccccggaagaccgctcggaccccgacgcatgcaccattagcaaggatcatggctacactatctattccacctttggagctttctacatcccgctgctgctcatgctggttctctatgggcgcatattccgagctgcgcgcttccgcatccgcaagacggtcaaaaaggtggagaagaccggagcggacacccgccatggagcatctcccgccccgcagcccaagaagagtgtgaatggagagtcggggagcaggaactggaggctgggcgtggagagcaaggctgggggtgctctgtgcgccaatggcgcggtgaggcaaggtgacgatggcgccgccctggaggtgatcgaggtgcaccgagtgggcaactccaaagagcacttgcctctgcccagcgaggctggtcctaccccttgtgcccccgcctctttcgagaggaaaaatgagcgcaacgccgaggcgaagcgcaagatggccctggcccgagagaggaagacagtgaagacgctgggcatcatcatgggcaccttcatcctctgctggctgcccttcttcatcgtggctcttgttctgcccttctgcgagagcagctgccacatgcccaccctgttgggcgccataatcaattggctgggctactccaactctctgcttaaccccgtcatttacgcatacttcaacaaggactttcaaaacgcgtttaagaagatcattaagtgtaagttctgccgccagtaccgtactcgagagaggagggcccgcttcgtgtccaagaaaggcaactgcaacgtcgcccacaagaacattcgagagcagggccgcttcctgcaggatgtgttcaccacgctggtggacctcaaatggccacacactctgctcattttcaccatgtccttcctgtgcagctggctgctctttgccatggtctggtggctcatcgccttcgcccacggtgacctggcccccggagagggcaccaatgtgccctgcgtcacaagcatccactccttttcatctgccttccttttctccatcgaggtccaggtgaccattggtttcggcgggcgcatggtgacagaggaatgtcccctggccatcctcattctcattgtgcagaatatcgtcgggctgatgatcaacgccatcatgctgggctgcatcttcatgaaaacggcccaggcacatcggcgggcagaaaccctcatcttcagcaagcatgctgtgatcaccctgcgccatggccgcctgtgcttcatgctgcgcgtaggggacctccgaaagagcatgatcattagcgccaccatccacatgcaggtggtgcgcaagaccaccagccccgagggcgaagttgtgcctctccaccaggtagacatccccatggagaatggcgtgggtggtaacggcatcttcctggtggccccactcatcatctaccacgtcatcgactccaacagcccgctctacgacctggctcctagtgacctgcaccaccaccaggacctggagatcattgtcatcttggaaggcgtggtagaaaccacgggcatcaccacccaggcccgcacctcctacctagctgacgagattctatgggggcagcgctttgtccccattgtggccgaggaggacggccgctattctgtggactactccaaatttggtaacaccattaaagtgcccacaccactctgcacagcccgccagcttgatgaggaccgcagt

SEQ ID NO: 124 - protein, 751 aa, Artificial sequence
  Synthetic Construct
MDVLSPGQGNNTTSPPAPFETGGNTTGISDVTVSYQVITSLLLGTLIFCAVLGNACVVAAIALERSLQNVANYLIGSLAVTDLMVSVLVLPMAALYQVLNKWTLGQVTCDLFIALDVLCCTSSILHLCAIALDRYWAITDPIDYVNKRTPRRAAALISLTWLIGFLISIPPMLGWRTPEDRSDPDACTISKDHGYTIYSTFGAFYIPLLLMLVLYGRIFRAARFRIRKTVKKVEKTGADTRHGASPAPQPKKSVNGESGSRNWRLGVESKAGGALCANGAVRQGDDGAALEVIEVHRVGNSKEHLPLPSEAGPTPCAPASFERKNERNAEAKRKMALARERKTVKTLGIIMGTFILCWLPFFIVALVLPFCESSCHMPTLLGAIINWLGYSNSLLNPVIYAYFNKDFQNAFKKIIKCKFCRQYRTRERRARFVSKKGNCNVAHKNIREQGRFLQDVFTTLVDLKWPHTLLIFTMSFLCSWLLFAMVWWLIAFAHGDLAPGEGTNVPCVTSIHSFSSAFLFSIEVQVTIGFGGRMVTEECPLAILILIVQNIVGLMINAIMLGCIFMKTAQAHRRAETLIFSKHAVITLRHGRLCFMLRVGDLRKSMIISATIHMQVVRKTTSPEGEVVPLHQVDIPMENGVGGNGIFLVAPLIIYHVIDSNSPLYDLAPSDLHHHQDLEIIVILEGVVETTGITTQARTSYLADEILWGQRFVPIVAEEDGRYSVDYSKFGNTIKVPTPLCTARQLDEDRS

SEQ ID NO: 125 - DNA, 2433 bp, Artificial sequence
  hybrid sequence
  CDS (1)..(2433)
atggatgtgctcagccctggtcagggcaacaacaccacatcaccaccggctccctttgagaccggcggcaacactactggtatctccgacgtgaccgtcagctaccaagtgatcacctctctgctgctgggcacgctcatcttctgcgcggtgctgggcaatgcgtgcgtggtggctgccatcgccttggagcgctccctgcagaacgtggccaattatcttattggctctttggcggtcaccgacctcatggtgtcggtgttggtgctgcccatggccgcgctgtatcaggtgctcaacaagtggacactgggccaggtaacctgcgacctgttcatcgccctcgacgtgctgtgctgcacctcatccatcttgcacctgtgcgccatcgcgctggacaggtactgggccatcacggaccccatcgactacgtgaacaagaggacgccccggcgcgccgctgcgctcatctcgctcacttggcttattggcttcctcatctctatcccgcccatgctgggctggcgcaccccggaagaccgctcggaccccgacgcatgcaccattagcaaggatcatggctacactatctattccacctttggagctttctacatcccgctgctgctcatgctggttctctatgggcgcatattccgagctgcgcgcttccgcatccgcaagacggtcaaaaaggtggagaagaccggagcggacacccgccatggagcatctcccgccccgcagcccaagaagagtgtgaatggagagtcggggagcaggaactggaggctgggcgtggagagcaaggctgggggtgctctgtgcgccaatggcgcggtgaggcaaggtgacgatggcgccgccctggaggtgatcgaggtgcaccgagtgggcaactccaaagagcacttgcctctgcccagcgaggctggtcctaccccttgtgcccccgcctctttcgagaggaaaaatgagcgcaacgccgaggcgaagcgcaagatggccctggcccgagagaggaagacagtgaagacgctgggcatcatcatgggcaccttcatcctctgctggctgcccttcttcatcgtggctcttgttctgcccttctgcgagagcagctgccacatgcccaccctgttgggcgccataatcaattggctgggctactccaactctctgcttaaccccgtcatttacgcatacttcaacaaggactttcaaaacgcgtttaagaagatcattaagtgtaagttctgccgccagggcgctacaaggtaccgtactcgagagaggagggcccgcttcgtgtccaagaaaggcaactgcaacgtcgcccacaagaacattcgagagcagggccgcttcctgcaggatgtgttcaccacgctggtggacctcaaatggccacacactctgctcattttcaccatgtccttcctgtgcagctggctgctctttgccatggtctggtggctcatcgccttcgcccacggtgatctctatgcttacatggagaaaggcatcacggacctggccccctacccatacgatgtaccagattacgccggagagggcaccaatgtgccctgcgtcacaagcatccactccttttcatctgccttccttttctccatcgaggtccaggtgaccattggtttcggcgggcgcatggtgacagaggaatgtcccctggccatcctcattctcattgtgcagaatatcgtcgggctgatgatcaacgccatcatgctgggctgcatcttcatgaaaacggcccaggcacatcggcgggcagaaaccctcatcttcagcaagcatgctgtgatcaccctgcgccatggccgcctgtgcttcatgctgcgcgtaggggacctccgaaagagcatgatcattagcgccaccatccacatgcaggtggtgcgcaagaccaccagccccgagggcgaagttgtgcctctccaccaggtagacatccccatggagaatggcgtgggtggtaacggcatcttcctggtggccccactcatcatctaccacgtcatcgactccaacagcccgctctacgacctggctcctagtgacctgcaccaccaccaggacctggagatcattgtcatcttggaaggcgtggtagaaaccacgggcatcaccacccaggcccgcacctcctacctagctgacgagattctatgggggcagcgctttgtccccattgtggccgaggaggacggccgctattctgtggactactccaaatttggtaacaccattaaagtgcccacaccactctgcacagcccgccagcttgatgaggaccgcagtctgctggatgccctgaccctcgcctcgtcgcgggggcccctgcgcaagcgcagtgtggctgtggcgaaggccaagcccaagtttagcatctctccagattccttgtcc

SEQ ID NO: 126 - protein, 811 aa, Artificial sequence
  Synthetic Construct
MDVLSPGQGNNTTSPPAPFETGGNTTGISDVTVSYQVITSLLLGTLIFCAVLGNACVVAAIALERSLQNVANYLIGSLAVTDLMVSVLVLPMAALYQVLNKWTLGQVTCDLFIALDVLCCTSSILHLCAIALDRYWAITDPIDYVNKRTPRRAAALISLTWLIGFLISIPPMLGWRTPEDRSDPDACTISKDHGYTIYSTFGAFYIPLLLMLVLYGRIFRAARFRIRKTVKKVEKTGADTRHGASPAPQPKKSVNGESGSRNWRLGVESKAGGALCANGAVRQGDDGAALEVIEVHRVGNSKEHLPLPSEAGPTPCAPASFERKNERNAEAKRKMALARERKTVKTLGIIMGTFILCWLPFFIVALVLPFCESSCHMPTLLGAIINWLGYSNSLLNPVIYAYFNKDFQNAFKKIIKCKFCRQGATRYRTRERRARFVSKKGNCNVAHKNIREQGRFLQDVFTTLVDLKWPHTLLIFTMSFLCSWLLFAMVWWLIAFAHGDLYAYMEKGITDLAPYPYDVPDYAGEGTNVPCVTSIHSFSSAFLFSIEVQVTIGFGGRMVTEECPLAILILIVQNIVGLMINAIMLGCIFMKTAQAHRRAETLIFSKHAVITLRHGRLCFMLRVGDLRKSMIISATIHMQVVRKTTSPEGEVVPLHQVDIPMENGVGGNGIFLVAPLIIYHVIDSNSPLYDLAPSDLHHHQDLEIIVILEGVVETTGITTQARTSYLADEILWGQRFVPIVAEEDGRYSVDYSKFGNTIKVPTPLCTARQLDEDRSLLDALTLASSRGPLRKRSVAVAKAKPKFSISPDSLS

SEQ ID NO: 127 - DNA, 2325 bp, Artificial sequence
  hybrid sequence
  CDS (1)..(2325)
atggatgtgctcagccctggtcagggcaacaacaccacatcaccaccggctccctttgagaccggcggcaacactactggtatctccgacgtgaccgtcagctaccaagtgatcacctctctgctgctgggcacgctcatcttctgcgcggtgctgggcaatgcgtgcgtggtggctgccatcgccttggagcgctccctgcagaacgtggccaattatcttattggctctttggcggtcaccgacctcatggtgtcggtgttggtgctgcccatggccgcgctgtatcaggtgctcaacaagtggacactgggccaggtaacctgcgacctgttcatcgccctcgacgtgctgtgctgcacctcatccatcttgcacctgtgcgccatcgcgctggacaggtactgggccatcacggaccccatcgactacgtgaacaagaggacgccccggcgcgccgctgcgctcatctcgctcacttggcttattggcttcctcatctctatcccgcccatgctgggctggcgcaccccggaagaccgctcggaccccgacgcatgcaccattagcaaggatcatggctacactatctattccacctttggagctttctacatcccgctgctgctcatgctggttctctatgggcgcatattccgagctgcgcgcttccgcatccgcaagacggtcaaaaaggtggagaagaccggagcggacacccgccatggagcatctcccgccccgcagcccaagaagagtgtgaatggagagtcggggagcaggaactggaggctgggcgtggagagcaaggctgggggtgctctgtgcgccaatggcgcggtgaggcaaggtgacgatggcgccgccctggaggtgatcgaggtgcaccgagtgggcaactccaaagagcacttgcctctgcccagcgaggctggtcctaccccttgtgcccccgcctctttcgagaggaaaaatgagcgcaacgccgaggcgaagcgcaagatggccctggcccgagagaggaagacagtgaagacgctgggcatcatcatgggcaccttcatcctctgctggctgcccttcttcatcgtggctcttgttctgcccttctgcgagagcagctgccacatgcccaccctgttgggcgccataatcaattggctgggctactccaactctctgcttaaccccgtcatttacgcatacttcaacaaggactttcaaaacgcgtttaagaagatcattaagtgtaagttctgccgccagggcgctacaaggtaccgtactcgagagaggagggcccgcttcgtgtccaagaaaggcaactgcaacgtcgcccacaagaacattcgagagcagggccgcttcctgcaggatgtgttcaccacgctggtggacctcaaatggccacacactctgctcattttcaccatgtccttcctgtgcagctggctgctctttgccatggtctggtggctcatcgccttcgcccacggtgatctctatgcttacatggagaaaggcatcacggacctggccccctacccatacgatgtaccagattacgccggagagggcaccaatgtgccctgcgtcacaagcatccactccttttcatctgccttccttttctccatcgaggtccaggtgaccattggtttcggcgggcgcatggtgacagaggaatgtcccctggccatcctcattctcattgtgcagaatatcgtcgggctgatgatcaacgccatcatgctgggctgcatcttcatgaaaacggcccaggcacatcggcgggcagaaaccctcatcttcagcaagcatgctgtgatcaccctgcgccatggccgcctgtgcttcatgctgcgcgtaggggacctccgaaagagcatgatcattagcgccaccatccacatgcaggtggtgcgcaagaccaccagccccgagggcgaagttgtgcctctccaccaggtagacatccccatggagaatggcgtgggtggtaacggcatcttcctggtggccccactcatcatctaccacgtcatcgactccaacagcccgctctacgacctggctcctagtgacctgcaccaccaccaggacctggagatcattgtcatcttggaaggcgtggtagaaaccacgggcatcaccacccaggcccgcacctcctacctagctgacgagattctatgggggcagcgctttgtccccattgtggccgaggaggacggccgctattctgtggactactccaaatttggtaacaccattaaagtgcccacaccactctgcacagcccgccagcttgatgaggaccgcagt

SEQ ID NO: 128 - protein, 775 aa, Artificial sequence
  Synthetic Construct
MDVLSPGQGNNTTSPPAPFETGGNTTGISDVTVSYQVITSLLLGTLIFCAVLGNACVVAAIALERSLQNVANYLIGSLAVTDLMVSVLVLPMAALYQVLNKWTLGQVTCDLFIALDVLCCTSSILHLCAIALDRYWAITDPIDYVNKRTPRRAAALISLTWLIGFLISIPPMLGWRTPEDRSDPDACTISKDHGYTIYSTFGAFYIPLLLMLVLYGRIFRAARFRIRKTVKKVEKTGADTRHGASPAPQPKKSVNGESGSRNWRLGVESKAGGALCANGAVRQGDDGAALEVIEVHRVGNSKEHLPLPSEAGPTPCAPASFERKNERNAEAKRKMALARERKTVKTLGIIMGTFILCWLPFFIVALVLPFCESSCHMPTLLGAIINWLGYSNSLLNPVIYAYFNKDFQNAFKKIIKCKFCRQGATRYRTRERRARFVSKKGNCNVAHKNIREQGRFLQDVFTTLVDLKWPHTLLIFTMSFLCSWLLFAMVWWLIAFAHGDLYAYMEKGITDLAPYPYDVPDYAGEGTNVPCVTSIHSFSSAFLFSIEVQVTIGFGGRMVTEECPLAILILIVQNIVGLMINAIMLGCIFMKTAQAHRRAETLIFSKHAVITLRHGRLCFMLRVGDLRKSMIISATIHMQVVRKTTSPEGEVVPLHQVDIPMENGVGGNGIFLVAPLIIYHVIDSNSPLYDLAPSDLHHHQDLEIIVILEGVVETTGITTQARTSYLADEILWGQRFVPIVAEEDGRYSVDYSKFGNTIKVPTPLCTARQLDEDRS

SEQ ID NO: 129 - DNA, 2373 bp, Artificial sequence
  hybrid sequence
  CDS (1)..(2373)
atggatgtgctcagccctggtcagggcaacaacaccacatcaccaccggctccctttgagaccggcggcaacactactggtatctccgacgtgaccgtcagctaccaagtgatcacctctctgctgctgggcacgctcatcttctgcgcggtgctgggcaatgcgtgcgtggtggctgccatcgccttggagcgctccctgcagaacgtggccaattatcttattggctctttggcggtcaccgacctcatggtgtcggtgttggtgctgcccatggccgcgctgtatcaggtgctcaacaagtggacactgggccaggtaacctgcgacctgttcatcgccctcgacgtgctgtgctgcacctcatccatcttgcacctgtgcgccatcgcgctggacaggtactgggccatcacggaccccatcgactacgtgaacaagaggacgccccggcgcgccgctgcgctcatctcgctcacttggcttattggcttcctcatctctatcccgcccatgctgggctggcgcaccccggaagaccgctcggaccccgacgcatgcaccattagcaaggatcatggctacactatctattccacctttggagctttctacatcccgctgctgctcatgctggttctctatgggcgcatattccgagctgcgcgcttccgcatccgcaagacggtcaaaaaggtggagaagaccggagcggacacccgccatggagcatctcccgccccgcagcccaagaagagtgtgaatggagagtcggggagcaggaactggaggctgggcgtggagagcaaggctgggggtgctctgtgcgccaatggcgcggtgaggcaaggtgacgatggcgccgccctggaggtgatcgaggtgcaccgagtgggcaactccaaagagcacttgcctctgcccagcgaggctggtcctaccccttgtgcccccgcctctttcgagaggaaaaatgagcgcaacgccgaggcgaagcgcaagatggccctggcccgagagaggaagacagtgaagacgctgggcatcatcatgggcaccttcatcctctgctggctgcccttcttcatcgtggctcttgttctgcccttctgcgagagcagctgccacatgcccaccctgttgggcgccataatcaattggctgggctactccaactctctgcttaaccccgtcatttacgcatacttcaacaaggactttcaaaacgcgtttaagaagatcattaagtgtaagttctgccgccagggcgctacaaggtaccgtactcgagagaggagggcccgcttcgtgtccaagaaaggcaactgcaacgtcgcccacaagaacattcgagagcagggccgcttcctgcaggatgtgttcaccacgctggtggacctcaaatggccacacactctgctcattttcaccatgtccttcctgtgcagctggctgctctttgccatggtctggtggctcatcgccttcgcccacggtgacctggcccccggagagggcaccaatgtgccctgcgtcacaagcatccactccttttcatctgccttccttttctccatcgaggtccaggtgaccattggtttcggcgggcgcatggtgacagaggaatgtcccctggccatcctcattctcattgtgcagaatatcgtcgggctgatgatcaacgccatcatgctgggctgcatcttcatgaaaacggcccaggcacatcggcgggcagaaaccctcatcttcagcaagcatgctgtgatcaccctgcgccatggccgcctgtgcttcatgctgcgcgtaggggacctccgaaagagcatgatcattagcgccaccatccacatgcaggtggtgcgcaagaccaccagccccgagggcgaagttgtgcctctccaccaggtagacatccccatggagaatggcgtgggtggtaacggcatcttcctggtggccccactcatcatctaccacgtcatcgactccaacagcccgctctacgacctggctcctagtgacctgcaccaccaccaggacctggagatcattgtcatcttggaaggcgtggtagaaaccacgggcatcaccacccaggcccgcacctcctacctagctgacgagattctatgggggcagcgctttgtccccattgtggccgaggaggacggccgctattctgtggactactccaaatttggtaacaccattaaagtgcccacaccactctgcacagcccgccagcttgatgaggaccgcagtctgctggatgccctgaccctcgcctcgtcgcgggggcccctgcgcaagcgcagtgtggctgtggcgaaggccaagcccaagtttagcatctctccagattccttgtcc

SEQ ID NO: 130 - protein, 791 aa, Artificial sequence
  Synthetic Construct
MDVLSPGQGNNTTSPPAPFETGGNTTGISDVTVSYQVITSLLLGTLIFCAVLGNACVVAAIALERSLQNVANYLIGSLAVTDLMVSVLVLPMAALYQVLNKWTLGQVTCDLFIALDVLCCTSSILHLCAIALDRYWAITDPIDYVNKRTPRRAAALISLTWLIGFLISIPPMLGWRTPEDRSDPDACTISKDHGYTIYSTFGAFYIPLLLMLVLYGRIFRAARFRIRKTVKKVEKTGADTRHGASPAPQPKKSVNGESGSRNWRLGVESKAGGALCANGAVRQGDDGAALEVIEVHRVGNSKEHLPLPSEAGPTPCAPASFERKNERNAEAKRKMALARERKTVKTLGIIMGTFILCWLPFFIVALVLPFCESSCHMPTLLGAIINWLGYSNSLLNPVIYAYFNKDFQNAFKKIIKCKFCRQGATRYRTRERRARFVSKKGNCNVAHKNIREQGRFLQDVFTTLVDLKWPHTLLIFTMSFLCSWLLFAMVWWLIAFAHGDLAPGEGTNVPCVTSIHSFSSAFLFSIEVQVTIGFGGRMVTEECPLAILILIVQNIVGLMINAIMLGCIFMKTAQAHRRAETLIFSKHAVITLRHGRLCFMLRVGDLRKSMIISATIHMQVVRKTTSPEGEVVPLHQVDIPMENGVGGNGIFLVAPLIIYHVIDSNSPLYDLAPSDLHHHQDLEIIVILEGVVETTGITTQARTSYLADEILWGQRFVPIVAEEDGRYSVDYSKFGNTIKVPTPLCTARQLDEDRSLLDALTLASSRGPLRKRSVAVAKAKPKFSISPDSLS

SEQ ID NO: 131 - DNA, 2265 bp, Artificial sequence
  hybrid sequence
  CDS (1)..(2265)
atggatgtgctcagccctggtcagggcaacaacaccacatcaccaccggctccctttgagaccggcggcaacactactggtatctccgacgtgaccgtcagctaccaagtgatcacctctctgctgctgggcacgctcatcttctgcgcggtgctgggcaatgcgtgcgtggtggctgccatcgccttggagcgctccctgcagaacgtggccaattatcttattggctctttggcggtcaccgacctcatggtgtcggtgttggtgctgcccatggccgcgctgtatcaggtgctcaacaagtggacactgggccaggtaacctgcgacctgttcatcgccctcgacgtgctgtgctgcacctcatccatcttgcacctgtgcgccatcgcgctggacaggtactgggccatcacggaccccatcgactacgtgaacaagaggacgccccggcgcgccgctgcgctcatctcgctcacttggcttattggcttcctcatctctatcccgcccatgctgggctggcgcaccccggaagaccgctcggaccccgacgcatgcaccattagcaaggatcatggctacactatctattccacctttggagctttctacatcccgctgctgctcatgctggttctctatgggcgcatattccgagctgcgcgcttccgcatccgcaagacggtcaaaaaggtggagaagaccggagcggacacccgccatggagcatctcccgccccgcagcccaagaagagtgtgaatggagagtcggggagcaggaactggaggctgggcgtggagagcaaggctgggggtgctctgtgcgccaatggcgcggtgaggcaaggtgacgatggcgccgccctggaggtgatcgaggtgcaccgagtgggcaactccaaagagcacttgcctctgcccagcgaggctggtcctaccccttgtgcccccgcctctttcgagaggaaaaatgagcgcaacgccgaggcgaagcgcaagatggccctggcccgagagaggaagacagtgaagacgctgggcatcatcatgggcaccttcatcctctgctggctgcccttcttcatcgtggctcttgttctgcccttctgcgagagcagctgccacatgcccaccctgttgggcgccataatcaattggctgggctactccaactctctgcttaaccccgtcatttacgcatacttcaacaaggactttcaaaacgcgtttaagaagatcattaagtgtaagttctgccgccagggcgctacaaggtaccgtactcgagagaggagggcccgcttcgtgtccaagaaaggcaactgcaacgtcgcccacaagaacattcgagagcagggccgcttcctgcaggatgtgttcaccacgctggtggacctcaaatggccacacactctgctcattttcaccatgtccttcctgtgcagctggctgctctttgccatggtctggtggctcatcgccttcgcccacggtgacctggcccccggagagggcaccaatgtgccctgcgtcacaagcatccactccttttcatctgccttccttttctccatcgaggtccaggtgaccattggtttcggcgggcgcatggtgacagaggaatgtcccctggccatcctcattctcattgtgcagaatatcgtcgggctgatgatcaacgccatcatgctgggctgcatcttcatgaaaacggcccaggcacatcggcgggcagaaaccctcatcttcagcaagcatgctgtgatcaccctgcgccatggccgcctgtgcttcatgctgcgcgtaggggacctccgaaagagcatgatcattagcgccaccatccacatgcaggtggtgcgcaagaccaccagccccgagggcgaagttgtgcctctccaccaggtagacatccccatggagaatggcgtgggtggtaacggcatcttcctggtggccccactcatcatctaccacgtcatcgactccaacagcccgctctacgacctggctcctagtgacctgcaccaccaccaggacctggagatcattgtcatcttggaaggcgtggtagaaaccacgggcatcaccacccaggcccgcacctcctacctagctgacgagattctatgggggcagcgctttgtccccattgtggccgaggaggacggccgctattctgtggactactccaaatttggtaacaccattaaagtgcccacaccactctgcacagcccgccagcttgatgaggaccgcagt

SEQ ID NO: 132 - protein, 755 aa, Artificial sequence
  Synthetic Construct
MDVLSPGQGNNTTSPPAPFETGGNTTGISDVTVSYQVITSLLLGTLIFCAVLGNACVVAAIALERSLQNVANYLIGSLAVTDLMVSVLVLPMAALYQVLNKWTLGQVTCDLFIALDVLCCTSSILHLCAIALDRYWAITDPIDYVNKRTPRRAAALISLTWLIGFLISIPPMLGWRTPEDRSDPDACTISKDHGYTIYSTFGAFYIPLLLMLVLYGRIFRAARFRIRKTVKKVEKTGADTRHGASPAPQPKKSVNGESGSRNWRLGVESKAGGALCANGAVRQGDDGAALEVIEVHRVGNSKEHLPLPSEAGPTPCAPASFERKNERNAEAKRKMALARERKTVKTLGIIMGTFILCWLPFFIVALVLPFCESSCHMPTLLGAIINWLGYSNSLLNPVIYAYFNKDFQNAFKKIIKCKFCRQGATRYRTRERRARFVSKKGNCNVAHKNIREQGRFLQDVFTTLVDLKWPHTLLIFTMSFLCSWLLFAMVWWLIAFAHGDLAPGEGTNVPCVTSIHSFSSAFLFSIEVQVTIGFGGRMVTEECPLAILILIVQNIVGLMINAIMLGCIFMKTAQAHRRAETLIFSKHAVITLRHGRLCFMLRVGDLRKSMIISATIHMQVVRKTTSPEGEVVPLHQVDIPMENGVGGNGIFLVAPLIIYHVIDSNSPLYDLAPSDLHHHQDLEIIVILEGVVETTGITTQARTSYLADEILWGQRFVPIVAEEDGRYSVDYSKFGNTIKVPTPLCTARQLDEDRS

SEQ ID NO: 133 - DNA, 2406 bp, Artificial sequence
  hybrid sequence
  CDS (1)..(2406)
atggatgtgctcagccctggtcagggcaacaacaccacatcaccaccggctccctttgagaccggcggcaacactactggtatctccgacgtgaccgtcagctaccaagtgatcacctctctgctgctgggcacgctcatcttctgcgcggtgctgggcaatgcgtgcgtggtggctgccatcgccttggagcgctccctgcagaacgtggccaattatcttattggctctttggcggtcaccgacctcatggtgtcggtgttggtgctgcccatggccgcgctgtatcaggtgctcaacaagtggacactgggccaggtaacctgcgacctgttcatcgccctcgacgtgctgtgctgcacctcatccatcttgcacctgtgcgccatcgcgctggacaggtactgggccatcacggaccccatcgactacgtgaacaagaggacgccccggcgcgccgctgcgctcatctcgctcacttggcttattggcttcctcatctctatcccgcccatgctgggctggcgcaccccggaagaccgctcggaccccgacgcatgcaccattagcaaggatcatggctacactatctattccacctttggagctttctacatcccgctgctgctcatgctggttctctatgggcgcatattccgagctgcgcgcttccgcatccgcaagacggtcaaaaaggtggagaagaccggagcggacacccgccatggagcatctcccgccccgcagcccaagaagagtgtgaatggagagtcggggagcaggaactggaggctgggcgtggagagcaaggctgggggtgctctgtgcgccaatggcgcggtgaggcaaggtgacgatggcgccgccctggaggtgatcgaggtgcaccgagtgggcaactccaaagagcacttgcctctgcccagcgaggctggtcctaccccttgtgcccccgcctctttcgagaggaaaaatgagcgcaacgccgaggcgaagcgcaagatggccctggcccgagagaggaagacagtgaagacgctgggcatcatcatgggcaccttcatcctctgctggctgcccttcttcatcgtggctcttgttctgcccttctgcgagagcagctgccacatgcccaccctgttgggcgccataatcaattggctgggctactccaactctctgcttaaccccgtcatttacgcatacttcaacaaggactttcaaaacgcgtttaagaagatcattaagtgtaagttctgccgccagaggagggcccgcttcgtgtccaagaaaggcaactgcaacgtcgcccacaagaacattcgagagcagggccgcttcctgcaggatgtgttcaccacgctggtggacctcaaatggccacacactctgctcattttcaccatgtccttcctgtgcagctggctgctctttgccatggtctggtggctcatcgccttcgcccacggtgatctctatgcttacatggagaaaggcatcacggacctggccccctacccatacgatgtaccagattacgccggagagggcaccaatgtgccctgcgtcacaagcatccactccttttcatctgccttccttttctccatcgaggtccaggtgaccattggtttcggcgggcgcatggtgacagaggaatgtcccctggccatcctcattctcattgtgcagaatatcgtcgggctgatgatcaacgccatcatgctgggctgcatcttcatgaaaacggcccaggcacatcggcgggcagaaaccctcatcttcagcaagcatgctgtgatcaccctgcgccatggccgcctgtgcttcatgctgcgcgtaggggacctccgaaagagcatgatcattagcgccaccatccacatgcaggtggtgcgcaagaccaccagccccgagggcgaagttgtgcctctccaccaggtagacatccccatggagaatggcgtgggtggtaacggcatcttcctggtggccccactcatcatctaccacgtcatcgactccaacagcccgctctacgacctggctcctagtgacctgcaccaccaccaggacctggagatcattgtcatcttggaaggcgtggtagaaaccacgggcatcaccacccaggcccgcacctcctacctagctgacgagattctatgggggcagcgctttgtccccattgtggccgaggaggacggccgctattctgtggactactccaaatttggtaacaccattaaagtgcccacaccactctgcacagcccgccagcttgatgaggaccgcagtctgctggatgccctgaccctcgcctcgtcgcgggggcccctgcgcaagcgcagtgtggctgtggcgaaggccaagcccaagtttagcatctctccagattccttgtcc

SEQ ID NO: 134 - protein, 802 aa, Artificial sequence
  Synthetic Construct
MDVLSPGQGNNTTSPPAPFETGGNTTGISDVTVSYQVITSLLLGTLIFCAVLGNACVVAAIALERSLQNVANYLIGSLAVTDLMVSVLVLPMAALYQVLNKWTLGQVTCDLFIALDVLCCTSSILHLCAIALDRYWAITDPIDYVNKRTPRRAAALISLTWLIGFLISIPPMLGWRTPEDRSDPDACTISKDHGYTIYSTFGAFYIPLLLMLVLYGRIFRAARFRIRKTVKKVEKTGADTRHGASPAPQPKKSVNGESGSRNWRLGVESKAGGALCANGAVRQGDDGAALEVIEVHRVGNSKEHLPLPSEAGPTPCAPASFERKNERNAEAKRKMALARERKTVKTLGIIMGTFILCWLPFFIVALVLPFCESSCHMPTLLGAIINWLGYSNSLLNPVIYAYFNKDFQNAFKKIIKCKFCRQRRARFVSKKGNCNVAHKNIREQGRFLQDVFTTLVDLKWPHTLLIFTMSFLCSWLLFAMVWWLIAFAHGDLYAYMEKGITDLAPYPYDVPDYAGEGTNVPCVTSIHSFSSAFLFSIEVQVTIGFGGRMVTEECPLAILILIVQNIVGLMINAIMLGCIFMKTAQAHRRAETLIFSKHAVITLRHGRLCFMLRVGDLRKSMIISATIHMQVVRKTTSPEGEVVPLHQVDIPMENGVGGNGIFLVAPLIIYHVIDSNSPLYDLAPSDLHHHQDLEIIVILEGVVETTGITTQARTSYLADEILWGQRFVPIVAEEDGRYSVDYSKFGNTIKVPTPLCTARQLDEDRSLLDALTLASSRGPLRKRSVAVAKAKPKFSISPDSLS

SEQ ID NO: 135 - DNA, 2298 bp, Artificial sequence
  hybrid sequence
  CDS (1)..(2298)
atggatgtgctcagccctggtcagggcaacaacaccacatcaccaccggctccctttgagaccggcggcaacactactggtatctccgacgtgaccgtcagctaccaagtgatcacctctctgctgctgggcacgctcatcttctgcgcggtgctgggcaatgcgtgcgtggtggctgccatcgccttggagcgctccctgcagaacgtggccaattatcttattggctctttggcggtcaccgacctcatggtgtcggtgttggtgctgcccatggccgcgctgtatcaggtgctcaacaagtggacactgggccaggtaacctgcgacctgttcatcgccctcgacgtgctgtgctgcacctcatccatcttgcacctgtgcgccatcgcgctggacaggtactgggccatcacggaccccatcgactacgtgaacaagaggacgccccggcgcgccgctgcgctcatctcgctcacttggcttattggcttcctcatctctatcccgcccatgctgggctggcgcaccccggaagaccgctcggaccccgacgcatgcaccattagcaaggatcatggctacactatctattccacctttggagctttctacatcccgctgctgctcatgctggttctctatgggcgcatattccgagctgcgcgcttccgcatccgcaagacggtcaaaaaggtggagaagaccggagcggacacccgccatggagcatctcccgccccgcagcccaagaagagtgtgaatggagagtcggggagcaggaactggaggctgggcgtggagagcaaggctgggggtgctctgtgcgccaatggcgcggtgaggcaaggtgacgatggcgccgccctggaggtgatcgaggtgcaccgagtgggcaactccaaagagcacttgcctctgcccagcgaggctggtcctaccccttgtgcccccgcctctttcgagaggaaaaatgagcgcaacgccgaggcgaagcgcaagatggccctggcccgagagaggaagacagtgaagacgctgggcatcatcatgggcaccttcatcctctgctggctgcccttcttcatcgtggctcttgttctgcccttctgcgagagcagctgccacatgcccaccctgttgggcgccataatcaattggctgggctactccaactctctgcttaaccccgtcatttacgcatacttcaacaaggactttcaaaacgcgtttaagaagatcattaagtgtaagttctgccgccagaggagggcccgcttcgtgtccaagaaaggcaactgcaacgtcgcccacaagaacattcgagagcagggccgcttcctgcaggatgtgttcaccacgctggtggacctcaaatggccacacactctgctcattttcaccatgtccttcctgtgcagctggctgctctttgccatggtctggtggctcatcgccttcgcccacggtgatctctatgcttacatggagaaaggcatcacggacctggccccctacccatacgatgtaccagattacgccggagagggcaccaatgtgccctgcgtcacaagcatccactccttttcatctgccttccttttctccatcgaggtccaggtgaccattggtttcggcgggcgcatggtgacagaggaatgtcccctggccatcctcattctcattgtgcagaatatcgtcgggctgatgatcaacgccatcatgctgggctgcatcttcatgaaaacggcccaggcacatcggcgggcagaaaccctcatcttcagcaagcatgctgtgatcaccctgcgccatggccgcctgtgcttcatgctgcgcgtaggggacctccgaaagagcatgatcattagcgccaccatccacatgcaggtggtgcgcaagaccaccagccccgagggcgaagttgtgcctctccaccaggtagacatccccatggagaatggcgtgggtggtaacggcatcttcctggtggccccactcatcatctaccacgtcatcgactccaacagcccgctctacgacctggctcctagtgacctgcaccaccaccaggacctggagatcattgtcatcttggaaggcgtggtagaaaccacgggcatcaccacccaggcccgcacctcctacctagctgacgagattctatgggggcagcgctttgtccccattgtggccgaggaggacggccgctattctgtggactactccaaatttggtaacaccattaaagtgcccacaccactctgcacagcccgccagcttgatgaggaccgcagt

SEQ ID NO: 136 - protein, 766 aa, Artificial sequence
  Synthetic Construct
MDVLSPGQGNNTTSPPAPFETGGNTTGISDVTVSYQVITSLLLGTLIFCAVLGNACVVAAIALERSLQNVANYLIGSLAVTDLMVSVLVLPMAALYQVLNKWTLGQVTCDLFIALDVLCCTSSILHLCAIALDRYWAITDPIDYVNKRTPRRAAALISLTWLIGFLISIPPMLGWRTPEDRSDPDACTISKDHGYTIYSTFGAFYIPLLLMLVLYGRIFRAARFRIRKTVKKVEKTGADTRHGASPAPQPKKSVNGESGSRNWRLGVESKAGGALCANGAVRQGDDGAALEVIEVHRVGNSKEHLPLPSEAGPTPCAPASFERKNERNAEAKRKMALARERKTVKTLGIIMGTFILCWLPFFIVALVLPFCESSCHMPTLLGAIINWLGYSNSLLNPVIYAYFNKDFQNAFKKIIKCKFCRQRRARFVSKKGNCNVAHKNIREQGRFLQDVFTTLVDLKWPHTLLIFTMSFLCSWLLFAMVWWLIAFAHGDLYAYMEKGITDLAPYPYDVPDYAGEGTNVPCVTSIHSFSSAFLFSIEVQVTIGFGGRMVTEECPLAILILIVQNIVGLMINAIMLGCIFMKTAQAHRRAETLIFSKHAVITLRHGRLCFMLRVGDLRKSMIISATIHMQVVRKTTSPEGEVVPLHQVDIPMENGVGGNGIFLVAPLIIYHVIDSNSPLYDLAPSDLHHHQDLEIIVILEGVVETTGITTQARTSYLADEILWGQRFVPIVAEEDGRYSVDYSKFGNTIKVPTPLCTARQLDEDRS

SEQ ID NO: 137 - DNA, 2346 bp, Artificial sequence
  hybrid sequence
  CDS (1)..(2346)
atggatgtgctcagccctggtcagggcaacaacaccacatcaccaccggctccctttgagaccggcggcaacactactggtatctccgacgtgaccgtcagctaccaagtgatcacctctctgctgctgggcacgctcatcttctgcgcggtgctgggcaatgcgtgcgtggtggctgccatcgccttggagcgctccctgcagaacgtggccaattatcttattggctctttggcggtcaccgacctcatggtgtcggtgttggtgctgcccatggccgcgctgtatcaggtgctcaacaagtggacactgggccaggtaacctgcgacctgttcatcgccctcgacgtgctgtgctgcacctcatccatcttgcacctgtgcgccatcgcgctggacaggtactgggccatcacggaccccatcgactacgtgaacaagaggacgccccggcgcgccgctgcgctcatctcgctcacttggcttattggcttcctcatctctatcccgcccatgctgggctggcgcaccccggaagaccgctcggaccccgacgcatgcaccattagcaaggatcatggctacactatctattccacctttggagctttctacatcccgctgctgctcatgctggttctctatgggcgcatattccgagctgcgcgcttccgcatccgcaagacggtcaaaaaggtggagaagaccggagcggacacccgccatggagcatctcccgccccgcagcccaagaagagtgtgaatggagagtcggggagcaggaactggaggctgggcgtggagagcaaggctgggggtgctctgtgcgccaatggcgcggtgaggcaaggtgacgatggcgccgccctggaggtgatcgaggtgcaccgagtgggcaactccaaagagcacttgcctctgcccagcgaggctggtcctaccccttgtgcccccgcctctttcgagaggaaaaatgagcgcaacgccgaggcgaagcgcaagatggccctggcccgagagaggaagacagtgaagacgctgggcatcatcatgggcaccttcatcctctgctggctgcccttcttcatcgtggctcttgttctgcccttctgcgagagcagctgccacatgcccaccctgttgggcgccataatcaattggctgggctactccaactctctgcttaaccccgtcatttacgcatacttcaacaaggactttcaaaacgcgtttaagaagatcattaagtgtaagttctgccgccagaggagggcccgcttcgtgtccaagaaaggcaactgcaacgtcgcccacaagaacattcgagagcagggccgcttcctgcaggatgtgttcaccacgctggtggacctcaaatggccacacactctgctcattttcaccatgtccttcctgtgcagctggctgctctttgccatggtctggtggctcatcgccttcgcccacggtgacctggcccccggagagggcaccaatgtgccctgcgtcacaagcatccactccttttcatctgccttccttttctccatcgaggtccaggtgaccattggtttcggcgggcgcatggtgacagaggaatgtcccctggccatcctcattctcattgtgcagaatatcgtcgggctgatgatcaacgccatcatgctgggctgcatcttcatgaaaacggcccaggcacatcggcgggcagaaaccctcatcttcagcaagcatgctgtgatcaccctgcgccatggccgcctgtgcttcatgctgcgcgtaggggacctccgaaagagcatgatcattagcgccaccatccacatgcaggtggtgcgcaagaccaccagccccgagggcgaagttgtgcctctccaccaggtagacatccccatggagaatggcgtgggtggtaacggcatcttcctggtggccccactcatcatctaccacgtcatcgactccaacagcccgctctacgacctggctcctagtgacctgcaccaccaccaggacctggagatcattgtcatcttggaaggcgtggtagaaaccacgggcatcaccacccaggcccgcacctcctacctagctgacgagattctatgggggcagcgctttgtccccattgtggccgaggaggacggccgctattctgtggactactccaaatttggtaacaccattaaagtgcccacaccactctgcacagcccgccagcttgatgaggaccgcagtctgctggatgccctgaccctcgcctcgtcgcgggggcccctgcgcaagcgcagtgtggctgtggcgaaggccaagcccaagtttagcatctctccagattccttgtcc

SEQ ID NO: 138 - protein, 782 aa, Artificial sequence
  Synthetic Construct
MDVLSPGQGNNTTSPPAPFETGGNTTGISDVTVSYQVITSLLLGTLIFCAVLGNACVVAAIALERSLQNVANYLIGSLAVTDLMVSVLVLPMAALYQVLNKWTLGQVTCDLFIALDVLCCTSSILHLCAIALDRYWAITDPIDYVNKRTPRRAAALISLTWLIGFLISIPPMLGWRTPEDRSDPDACTISKDHGYTIYSTFGAFYIPLLLMLVLYGRIFRAARFRIRKTVKKVEKTGADTRHGASPAPQPKKSVNGESGSRNWRLGVESKAGGALCANGAVRQGDDGAALEVIEVHRVGNSKEHLPLPSEAGPTPCAPASFERKNERNAEAKRKMALARERKTVKTLGIIMGTFILCWLPFFIVALVLPFCESSCHMPTLLGAIINWLGYSNSLLNPVIYAYFNKDFQNAFKKIIKCKFCRQRRARFVSKKGNCNVAHKNIREQGRFLQDVFTTLVDLKWPHTLLIFTMSFLCSWLLFAMVWWLIAFAHGDLAPGEGTNVPCVTSIHSFSSAFLFSIEVQVTIGFGGRMVTEECPLAILILIVQNIVGLMINAIMLGCIFMKTAQAHRRAETLIFSKHAVITLRHGRLCFMLRVGDLRKSMIISATIHMQVVRKTTSPEGEVVPLHQVDIPMENGVGGNGIFLVAPLIIYHVIDSNSPLYDLAPSDLHHHQDLEIIVILEGVVETTGITTQARTSYLADEILWGQRFVPIVAEEDGRYSVDYSKFGNTIKVPTPLCTARQLDEDRSLLDALTLASSRGPLRKRSVAVAKAKPKFSISPDSLS

SEQ ID NO: 139 - DNA, 2238 bp, Artificial sequence
  hybrid sequence
  CDS (1)..(2238)
atggatgtgctcagccctggtcagggcaacaacaccacatcaccaccggctccctttgagaccggcggcaacactactggtatctccgacgtgaccgtcagctaccaagtgatcacctctctgctgctgggcacgctcatcttctgcgcggtgctgggcaatgcgtgcgtggtggctgccatcgccttggagcgctccctgcagaacgtggccaattatcttattggctctttggcggtcaccgacctcatggtgtcggtgttggtgctgcccatggccgcgctgtatcaggtgctcaacaagtggacactgggccaggtaacctgcgacctgttcatcgccctcgacgtgctgtgctgcacctcatccatcttgcacctgtgcgccatcgcgctggacaggtactgggccatcacggaccccatcgactacgtgaacaagaggacgccccggcgcgccgctgcgctcatctcgctcacttggcttattggcttcctcatctctatcccgcccatgctgggctggcgcaccccggaagaccgctcggaccccgacgcatgcaccattagcaaggatcatggctacactatctattccacctttggagctttctacatcccgctgctgctcatgctggttctctatgggcgcatattccgagctgcgcgcttccgcatccgcaagacggtcaaaaaggtggagaagaccggagcggacacccgccatggagcatctcccgccccgcagcccaagaagagtgtgaatggagagtcggggagcaggaactggaggctgggcgtggagagcaaggctgggggtgctctgtgcgccaatggcgcggtgaggcaaggtgacgatggcgccgccctggaggtgatcgaggtgcaccgagtgggcaactccaaagagcacttgcctctgcccagcgaggctggtcctaccccttgtgcccccgcctctttcgagaggaaaaatgagcgcaacgccgaggcgaagcgcaagatggccctggcccgagagaggaagacagtgaagacgctgggcatcatcatgggcaccttcatcctctgctggctgcccttcttcatcgtggctcttgttctgcccttctgcgagagcagctgccacatgcccaccctgttgggcgccataatcaattggctgggctactccaactctctgcttaaccccgtcatttacgcatacttcaacaaggactttcaaaacgcgtttaagaagatcattaagtgtaagttctgccgccagaggagggcccgcttcgtgtccaagaaaggcaactgcaacgtcgcccacaagaacattcgagagcagggccgcttcctgcaggatgtgttcaccacgctggtggacctcaaatggccacacactctgctcattttcaccatgtccttcctgtgcagctggctgctctttgccatggtctggtggctcatcgccttcgcccacggtgacctggcccccggagagggcaccaatgtgccctgcgtcacaagcatccactccttttcatctgccttccttttctccatcgaggtccaggtgaccattggtttcggcgggcgcatggtgacagaggaatgtcccctggccatcctcattctcattgtgcagaatatcgtcgggctgatgatcaacgccatcatgctgggctgcatcttcatgaaaacggcccaggcacatcggcgggcagaaaccctcatcttcagcaagcatgctgtgatcaccctgcgccatggccgcctgtgcttcatgctgcgcgtaggggacctccgaaagagcatgatcattagcgccaccatccacatgcaggtggtgcgcaagaccaccagccccgagggcgaagttgtgcctctccaccaggtagacatccccatggagaatggcgtgggtggtaacggcatcttcctggtggccccactcatcatctaccacgtcatcgactccaacagcccgctctacgacctggctcctagtgacctgcaccaccaccaggacctggagatcattgtcatcttggaaggcgtggtagaaaccacgggcatcaccacccaggcccgcacctcctacctagctgacgagattctatgggggcagcgctttgtccccattgtggccgaggaggacggccgctattctgtggactactccaaatttggtaacaccattaaagtgcccacaccactctgcacagcccgccagcttgatgaggaccgcagt

SEQ ID NO: 140 - protein, 746 aa, Artificial sequence
  Synthetic Construct
MDVLSPGQGNNTTSPPAPFETGGNTTGISDVTVSYQVITSLLLGTLIFCAVLGNACVVAAIALERSLQNVANYLIGSLAVTDLMVSVLVLPMAALYQVLNKWTLGQVTCDLFIALDVLCCTSSILHLCAIALDRYWAITDPIDYVNKRTPRRAAALISLTWLIGFLISIPPMLGWRTPEDRSDPDACTISKDHGYTIYSTFGAFYIPLLLMLVLYGRIFRAARFRIRKTVKKVEKTGADTRHGASPAPQPKKSVNGESGSRNWRLGVESKAGGALCANGAVRQGDDGAALEVIEVHRVGNSKEHLPLPSEAGPTPCAPASFERKNERNAEAKRKMALARERKTVKTLGIIMGTFILCWLPFFIVALVLPFCESSCHMPTLLGAIINWLGYSNSLLNPVIYAYFNKDFQNAFKKIIKCKFCRQRRARFVSKKGNCNVAHKNIREQGRFLQDVFTTLVDLKWPHTLLIFTMSFLCSWLLFAMVWWLIAFAHGDLAPGEGTNVPCVTSIHSFSSAFLFSIEVQVTIGFGGRMVTEECPLAILILIVQNIVGLMINAIMLGCIFMKTAQAHRRAETLIFSKHAVITLRHGRLCFMLRVGDLRKSMIISATIHMQVVRKTTSPEGEVVPLHQVDIPMENGVGGNGIFLVAPLIIYHVIDSNSPLYDLAPSDLHHHQDLEIIVILEGVVETTGITTQARTSYLADEILWGQRFVPIVAEEDGRYSVDYSKFGNTIKVPTPLCTARQLDEDRS

SEQ ID NO: 141 - DNA, 2211 bp, Artificial sequence
  hybrid sequence
  CDS (1)..(2211)
atggaggggatcagtatatacacttcagataactacaccgaggaaatgggctcaggggactatgactccatgaaggaaccctgtttccgtgaagaaaatgctaatttcaataaaatcttcctgcccaccatctactccatcatcttcttaactggcattgtgggcaatggattggtcatcctggtcatgggttaccagaagaaactgagaagcatgacggacaagtacaggctgcacctgtcagtggccgacctcctctttgtcatcacgcttcccttctgggcagttgatgccgtggcaaactggtactttgggaacttcctatgcaaggcagtccatgtcatctacacagtcaacctctacagcagtgtcctcatcctggccttcatcagtctggaccgctacctggccatcgtccacgccaccaacagtcagaggccaaggaagctgttggctgaaaaggtggtctatgttggcgtctggatccctgccctcctgctgactattcccgacttcatctttgccaacgtcagtgaggcagatgacagatatatctgtgaccgcttctaccccaatgacttgtgggtggttgtgttccagtttcagcacatcatggttggccttatcctgcctggtattgtcatcctgtcctgctattgcattatcatctccaagctgtcacactccaagggccaccagaagcgcaaggccctcaagaccacagtcatcctcatcctggctttcttcgcctgttggctgccttactacattgggatcagcatcgactccttcatcctcctggaaatcatcaagcaagggtgtgagtttgagaacactgtgcacaagtggatttccatcaccgaggccctagctttcttccactgttgtctgaaccccatcctctatgctttccttggagccaaatttaaaacctctgcccagcacgcactcacctctgtgagcagagggtccagcctcaagatcctctccaaaggaaagcgaggtggacattcatctgtttccactgagtctgagtcttcaagttttcactccagctaccgtactcgagagaggagggcccgcttcgtgtccaagaaaggcaactgcaacgtcgcccacaagaacattcgagagcagggccgcttcctgcaggatgtgttcaccacgctggtggacctcaaatggccacacactctgctcattttcaccatgtccttcctgtgcagctggctgctctttgccatggtctggtggctcatcgccttcgcccacggtgatctctatgcttacatggagaaaggcatcacggacctggccccctacccatacgatgtaccagattacgccggagagggcaccaatgtgccctgcgtcacaagcatccactccttttcatctgccttccttttctccatcgaggtccaggtgaccattggtttcggcgggcgcatggtgacagaggaatgtcccctggccatcctcattctcattgtgcagaatatcgtcgggctgatgatcaacgccatcatgctgggctgcatcttcatgaaaacggcccaggcacatcggcgggcagaaaccctcatcttcagcaagcatgctgtgatcaccctgcgccatggccgcctgtgcttcatgctgcgcgtaggggacctccgaaagagcatgatcattagcgccaccatccacatgcaggtggtgcgcaagaccaccagccccgagggcgaagttgtgcctctccaccaggtagacatccccatggagaatggcgtgggtggtaacggcatcttcctggtggccccactcatcatctaccacgtcatcgactccaacagcccgctctacgacctggctcctagtgacctgcaccaccaccaggacctggagatcattgtcatcttggaaggcgtggtagaaaccacgggcatcaccacccaggcccgcacctcctacctagctgacgagattctatgggggcagcgctttgtccccattgtggccgaggaggacggccgctattctgtggactactccaaatttggtaacaccattaaagtgcccacaccactctgcacagcccgccagcttgatgaggaccgcagtctgctggatgccctgaccctcgcctcgtcgcgggggcccctgcgcaagcgcagtgtggctgtggcgaaggccaagcccaagtttagcatctctccagattccttgtcc

SEQ ID NO: 142 - protein, 737 aa, Artificial sequence [sequence omitted]

SEQ ID NO: 143 - DNA, 2103 bp, Artificial sequence
  hybrid sequence
  CDS (1)..(2103)
atggaggggatcagtatatacacttcagataactacaccgaggaaatgggctcaggggactatgactccatgaaggaaccctgtttccgtgaagaaaatgctaatttcaataaaatcttcctgcccaccatctactccatcatcttcttaactggcattgtgggcaatggattggtcatcctggtcatgggttaccagaagaaactgagaagcatgacggacaagtacaggctgcacctgtcagtggccgacctcctctttgtcatcacgcttcccttctgggcagttgatgccgtggcaaactggtactttgggaacttcctatgcaaggcagtccatgtcatctacacagtcaacctctacagcagtgtcctcatcctggccttcatcagtctggaccgctacctggccatcgtccacgccaccaacagtcagaggccaaggaagctgttggctgaaaaggtggtctatgttggcgtctggatccctgccctcctgctgactattcccgacttcatctttgccaacgtcagtgaggcagatgacagatatatctgtgaccgcttctaccccaatgacttgtgggtggttgtgttccagtttcagcacatcatggttggccttatcctgcctggtattgtcatcctgtcctgctattgcattatcatctccaagctgtcacactccaagggccaccagaagcgcaaggccctcaagaccacagtcatcctcatcctggctttcttcgcctgttggctgccttactacattgggatcagcatcgactccttcatcctcctggaaatcatcaagcaagggtgtgagtttgagaacactgtgcacaagtggatttccatcaccgaggccctagctttcttccactgttgtctgaaccccatcctctatgctttccttggagccaaatttaaaacctctgcccagcacgcactcacctctgtgagcagagggtccagcctcaagatcctctccaaaggaaagcgaggtggacattcatctgtttccactgagtctgagtcttcaagttttcactccagctaccgtactcgagagaggagggcccgcttcgtgtccaagaaaggcaactgcaacgtcgcccacaagaacattcgagagcagggccgcttcctgcaggatgtgttcaccacgctggtggacctcaaatggccacacactctgctcattttcaccatgtccttcctgtgcagctggctgctctttgccatggtctggtggctcatcgccttcgcccacggtgatctctatgcttacatggagaaaggcatcacggacctggccccctacccatacgatgtaccagattacgccggagagggcaccaatgtgccctgcgtcacaagcatccactccttttcatctgccttccttttctccatcgaggtccaggtgaccattggtttcggcgggcgcatggtgacagaggaatgtcccctggccatcctcattctcattgtgcagaatatcgtcgggctgatgatcaacgccatcatgctgggctgcatcttcatgaaaacggcccaggcacatcggcgggcagaaaccctcatcttcagcaagcatgctgtgatcaccctgcgccatggccgcctgtgcttcatgctgcgcgtaggggacctccgaaagagcatgatcattagcgccaccatccacatgcaggtggtgcgcaagaccaccagccccgagggcgaagttgtgcctctccaccaggtagacatccccatggagaatggcgtgggtggtaacggcatcttcctggtggccccactcatcatctaccacgtcatcgactccaacagcccgctctacgacctggctcctagtgacctgcaccaccaccaggacctggagatcattgtcatcttggaaggcgtggtagaaaccacgggcatcaccacccaggcccgcacctcctacctagctgacgagattctatgggggcagcgctttgtccccattgtggccgaggaggacggccgctattctgtggactactccaaatttggtaacaccattaaagtgcccacaccactctgcacagcccgccagcttgatgaggaccgcagt

SEQ ID NO: 144 - protein, 701 aa, Artificial sequence
  Synthetic Construct
MEGISIYTSDNYTEEMGSGDYDSMKEPCFREENANFNKIFLPTIYSIIFLTGIVGNGLVILVMGYQKKLRSMTDKYRLHLSVADLLFVITLPFWAVDAVANWYFGNFLCKAVHVIYTVNLYSSVLILAFISLDRYLAIVHATNSQRPRKLLAEKVVYVGVWIPALLLTIPDFIFANVSEADDRYICDRFYPNDLWVVVFQFQHIMVGLILPGIVILSCYCIIISKLSHSKGHQKRKALKTTVILILAFFACWLPYYIGISIDSFILLEIIKQGCEFENTVHKWISITEALAFFHCCLNPILYAFLGAKFKTSAQHALTSVSRGSSLKILSKGKRGGHSSVSTESESSSFHSSYRTRERRARFVSKKGNCNVAHKNIREQGRFLQDVFTTLVDLKWPHTLLIFTMSFLCSWLLFAMVWWLIAFAHGDLYAYMEKGITDLAPYPYDVPDYAGEGTNVPCVTSIHSFSSAFLFSIEVQVTIGFGGRMVTEECPLAILILIVQNIVGLMINAIMLGCIFMKTAQAHRRAETLIFSKHAVITLRHGRLCFMLRVGDLRKSMIISATIHMQVVRKTTSPEGEVVPLHQVDIPMENGVGGNGIFLVAPLIIYHVIDSNSPLYDLAPSDLHHHQDLEIIVILEGVVETTGITTQARTSYLADEILWGQRFVPIVAEEDGRYSVDYSKFGNTIKVPTPLCTARQLDEDRS

SEQ ID NO: 145 - DNA, 2151 bp, Artificial sequence
  hybrid sequence
  CDS (1)..(2151)
atggaggggatcagtatatacacttcagataactacaccgaggaaatgggctcaggggactatgactccatgaaggaaccctgtttccgtgaagaaaatgctaatttcaataaaatcttcctgcccaccatctactccatcatcttcttaactggcattgtgggcaatggattggtcatcctggtcatgggttaccagaagaaactgagaagcatgacggacaagtacaggctgcacctgtcagtggccgacctcctctttgtcatcacgcttcccttctgggcagttgatgccgtggcaaactggtactttgggaacttcctatgcaaggcagtccatgtcatctacacagtcaacctctacagcagtgtcctcatcctggccttcatcagtctggaccgctacctggccatcgtccacgccaccaacagtcagaggccaaggaagctgttggctgaaaaggtggtctatgttggcgtctggatccctgccctcctgctgactattcccgacttcatctttgccaacgtcagtgaggcagatgacagatatatctgtgaccgcttctaccccaatgacttgtgggtggttgtgttccagtttcagcacatcatggttggccttatcctgcctggtattgtcatcctgtcctgctattgcattatcatctccaagctgtcacactccaagggccaccagaagcgcaaggccctcaagaccacagtcatcctcatcctggctttcttcgcctgttggctgccttactacattgggatcagcatcgactccttcatcctcctggaaatcatcaagcaagggtgtgagtttgagaacactgtgcacaagtggatttccatcaccgaggccctagctttcttccactgttgtctgaaccccatcctctatgctttccttggagccaaatttaaaacctctgcccagcacgcactcacctctgtgagcagagggtccagcctcaagatcctctccaaaggaaagcgaggtggacattcatctgtttccactgagtctgagtcttcaagttttcactccagctaccgtactcgagagaggagggcccgcttcgtgtccaagaaaggcaactgcaacgtcgcccacaagaacattcgagagcagggccgcttcctgcaggatgtgttcaccacgctggtggacctcaaatggccacacactctgctcattttcaccatgtccttcctgtgcagctggctgctctttgccatggtctggtggctcatcgccttcgcccacggtgacctggcccccggagagggcaccaatgtgccctgcgtcacaagcatccactccttttcatctgccttccttttctccatcgaggtccaggtgaccattggtttcggcgggcgcatggtgacagaggaatgtcccctggccatcctcattctcattgtgcagaatatcgtcgggctgatgatcaacgccatcatgctgggctgcatcttcatgaaaacggcccaggcacatcggcgggcagaaaccctcatcttcagcaagcatgctgtgatcaccctgcgccatggccgcctgtgcttcatgctgcgcgtaggggacctccgaaagagcatgatcattagcgccaccatccacatgcaggtggtgcgcaagaccaccagccccgagggcgaagttgtgcctctccaccaggtagacatccccatggagaatggcgtgggtggtaacggcatcttcctggtggccccactcatcatctaccacgtcatcgactccaacagcccgctctacgacctggctcctagtgacctgcaccaccaccaggacctggagatcattgtcatcttggaaggcgtggtagaaaccacgggcatcaccacccaggcccgcacctcctacctagctgacgagattctatgggggcagcgctttgtccccattgtggccgaggaggacggccgctattctgtggactactccaaatttggtaacaccattaaagtgcccacaccactctgcacagcccgccagcttgatgaggaccgcagtctgctggatgccctgaccctcgcctcgtcgcgggggcccctgcgcaagcgcagtgtggctgtggcgaaggccaagcccaagtttagcatctctccagattccttgtcc

SEQ ID NO: 146 - protein, 717 aa, Artificial sequence
  Synthetic Construct
MEGISIYTSDNYTEEMGSGDYDSMKEPCFREENANFNKIFLPTIYSIIFLTGIVGNGLVILVMGYQKKLRSMTDKYRLHLSVADLLFVITLPFWAVDAVANWYFGNFLCKAVHVIYTVNLYSSVLILAFISLDRYLAIVHATNSQRPRKLLAEKVVYVGVWIPALLLTIPDFIFANVSEADDRYICDRFYPNDLWVVVFQFQHIMVGLILPGIVILSCYCIIISKLSHSKGHQKRKALKTTVILILAFFACWLPYYIGISIDSFILLEIIKQGCEFENTVHKWISITEALAFFHCCLNPILYAFLGAKFKTSAQHALTSVSRGSSLKILSKGKRGGHSSVSTESESSSFHSSYRTRERRARFVSKKGNCNVAHKNIREQGRFLQDVFTTLVDLKWPHTLLIFTMSFLCSWLLFAMVWWLIAFAHGDLAPGEGTNVPCVTSIHSFSSAFLFSIEVQVTIGFGGRMVTEECPLAILILIVQNIVGLMINAIMLGCIFMKTAQAHRRAETLIFSKHAVITLRHGRLCFMLRVGDLRKSMIISATIHMQVVRKTTSPEGEVVPLHQVDIPMENGVGGNGIFLVAPLIIYHVIDSNSPLYDLAPSDLHHHQDLEIIVILEGVVETTGITTQARTSYLADEILWGQRFVPIVAEEDGRYSVDYSKFGNTIKVPTPLCTARQLDEDRSLLDALTLASSRGPLRKRSVAVAKAKPKFSISPDSLS

SEQ ID NO: 147 - DNA, 2043 bp, Artificial sequence
  hybrid sequence
  CDS (1)..(2043)
atggaggggatcagtatatacacttcagataactacaccgaggaaatgggctcaggggactatgactccatgaaggaaccctgtttccgtgaagaaaatgctaatttcaataaaatcttcctgcccaccatctactccatcatcttcttaactggcattgtgggcaatggattggtcatcctggtcatgggttaccagaagaaactgagaagcatgacggacaagtacaggctgcacctgtcagtggccgacctcctctttgtcatcacgcttcccttctgggcagttgatgccgtggcaaactggtactttgggaacttcctatgcaaggcagtccatgtcatctacacagtcaacctctacagcagtgtcctcatcctggccttcatcagtctggaccgctacctggccatcgtccacgccaccaacagtcagaggccaaggaagctgttggctgaaaaggtggtctatgttggcgtctggatccctgccctcctgctgactattcccgacttcatctttgccaacgtcagtgaggcagatgacagatatatctgtgaccgcttctaccccaatgacttgtgggtggttgtgttccagtttcagcacatcatggttggccttatcctgcctggtattgtcatcctgtcctgctattgcattatcatctccaagctgtcacactccaagggccaccagaagcgcaaggccctcaagaccacagtcatcctcatcctggctttcttcgcctgttggctgccttactacattgggatcagcatcgactccttcatcctcctggaaatcatcaagcaagggtgtgagtttgagaacactgtgcacaagtggatttccatcaccgaggccctagctttcttccactgttgtctgaaccccatcctctatgctttccttggagccaaatttaaaacctctgcccagcacgcactcacctctgtgagcagagggtccagcctcaagatcctctccaaaggaaagcgaggtggacattcatctgtttccactgagtctgagtcttcaagttttcactccagctaccgtactcgagagaggagggcccgcttcgtgtccaagaaaggcaactgcaacgtcgcccacaagaacattcgagagcagggccgcttcctgcaggatgtgttcaccacgctggtggacctcaaatggccacacactctgctcattttcaccatgtccttcctgtgcagctggctgctctttgccatggtctggtggctcatcgccttcgcccacggtgacctggcccccggagagggcaccaatgtgccctgcgtcacaagcatccactccttttcatctgccttccttttctccatcgaggtccaggtgaccattggtttcggcgggcgcatggtgacagaggaatgtcccctggccatcctcattctcattgtgcagaatatcgtcgggctgatgatcaacgccatcatgctgggctgcatcttcatgaaaacggcccaggcacatcggcgggcagaaaccctcatcttcagcaagcatgctgtgatcaccctgcgccatggccgcctgtgcttcatgctgcgcgtaggggacctccgaaagagcatgatcattagcgccaccatccacatgcaggtggtgcgcaagaccaccagccccgagggcgaagttgtgcctctccaccaggtagacatccccatggagaatggcgtgggtggtaacggcatcttcctggtggccccactcatcatctaccacgtcatcgactccaacagcccgctctacgacctggctcctagtgacctgcaccaccaccaggacctggagatcattgtcatcttggaaggcgtggtagaaaccacgggcatcaccacccaggcccgcacctcctacctagctgacgagattctatgggggcagcgctttgtccccattgtggccgaggaggacggccgctattctgtggactactccaaatttggtaacaccattaaagtgcccacaccactctgcacagcccgccagcttgatgaggaccgcagt

SEQ ID NO: 148 - protein, 681 aa, Artificial sequence
  Synthetic Construct
MEGISIYTSDNYTEEMGSGDYDSMKEPCFREENANFNKIFLPTIYSIIFLTGIVGNGLVILVMGYQKKLRSMTDKYRLHLSVADLLFVITLPFWAVDAVANWYFGNFLCKAVHVIYTVNLYSSVLILAFISLDRYLAIVHATNSQRPRKLLAEKVVYVGVWIPALLLTIPDFIFANVSEADDRYICDRFYPNDLWVVVFQFQHIMVGLILPGIVILSCYCIIISKLSHSKGHQKRKALKTTVILILAFFACWLPYYIGISIDSFILLEIIKQGCEFENTVHKWISITEALAFFHCCLNPILYAFLGAKFKTSAQHALTSVSRGSSLKILSKGKRGGHSSVSTESESSSFHSSYRTRERRARFVSKKGNCNVAHKNIREQGRFLQDVFTTLVDLKWPHTLLIFTMSFLCSWLLFAMVWWLIAFAHGDLAPGEGTNVPCVTSIHSFSSAFLFSIEVQVTIGFGGRMVTEECPLAILILIVQNIVGLMINAIMLGCIFMKTAQAHRRAETLIFSKHAVITLRHGRLCFMLRVGDLRKSMIISATIHMQVVRKTTSPEGEVVPLHQVDIPMENGVGGNGIFLVAPLIIYHVIDSNSPLYDLAPSDLHHHQDLEIIVILEGVVETTGITTQARTSYLADEILWGQRFVPIVAEEDGRYSVDYSKFGNTIKVPTPLCTARQLDEDRS

SEQ ID NO: 149 - DNA, 2211 bp, Artificial sequence
  hybrid sequence
  CDS (1)..(2211)
atggattatcaagtgtcaagtccaatctatgacatcaattattatacatcggagccctgccaaaaaatcaatgtgaagcaaatcgcagcccgcctcctgcctccgctctactcactggtgttcatctttggttttgtgggcaacatgctggtcatcctcatcctgataaactgcaaaaggctgaagagcatgactgacatctacctgctcaacctggccatctctgacctgtttttccttcttactgtccccttctgggctcactatgctgccgcccagtgggactttggaaatacaatgtgtcaactcttgacagggctctattttataggcttcttctctggaatcttcttcatcatcctcctgacaatcgataggtacctggctgtcgtccatgctgtgtttgctttaaaagccaggacggtcacctttggggtggtgacaagtgtgatcacttgggtggtggctgtgtttgcgtctctcccaggaatcatctttaccagatctcaaaaagaaggtcttcattacacctgcagctctcattttccatacagtcagtatcaattctggaagaatttccagacattaaagatagtcatcttggggctggtcctgccgctgcttgtcatggtcatctgctactcgggaatcctaaaaactctgcttcggtgtcgaaatgagaagaagaggcacagggctgtgaggcttatcttcaccatcatgattgtttattttctcttctgggctccctacaacattgtccttctcctgaacaccttccaggaattctttggcctgaataattgcagtagctctaacaggttggaccaagctatgcaggtgacagagactcttgggatgacgcactgctgcatcaaccccatcatctatgcctttgtcggggagaagttcagaaactacctcttagtcttcttccaaaagcacattgccaaacgcttctgcaaatgctgttctattttccagcaagaggctcccgagcgagcaagctcagtttacacccgatccactggggagcaggaaatatctgtgggcttgtaccgtactcgagagaggagggcccgcttcgtgtccaagaaaggcaactgcaacgtcgcccacaagaacattcgagagcagggccgcttcctgcaggatgtgttcaccacgctggtggacctcaaatggccacacactctgctcattttcaccatgtccttcctgtgcagctggctgctctttgccatggtctggtggctcatcgccttcgcccacggtgatctctatgcttacatggagaaaggcatcacggacctggccccctacccatacgatgtaccagattacgccggagagggcaccaatgtgccctgcgtcacaagcatccactccttttcatctgccttccttttctccatcgaggtccaggtgaccattggtttcggcgggcgcatggtgacagaggaatgtcccctggccatcctcattctcattgtgcagaatatcgtcgggctgatgatcaacgccatcatgctgggctgcatcttcatgaaaacggcccaggcacatcggcgggcagaaaccctcatcttcagcaagcatgctgtgatcaccctgcgccatggccgcctgtgcttcatgctgcgcgtaggggacctccgaaagagcatgatcattagcgccaccatccacatgcaggtggtgcgcaagaccaccagccccgagggcgaagttgtgcctctccaccaggtagacatccccatggagaatggcgtgggtggtaacggcatcttcctggtggccccactcatcatctaccacgtcatcgactccaacagcccgctctacgacctggctcctagtgacctgcaccaccaccaggacctggagatcattgtcatcttggaaggcgtggtagaaaccacgggcatcaccacccaggcccgcacctcctacctagctgacgagattctatgggggcagcgctttgtccccattgtggccgaggaggacggccgctattctgtggactactccaaatttggtaacaccattaaagtgcccacaccactctgcacagcccgccagcttgatgaggaccgcagtctgctggatgccctgaccctcgcctcgtcgcgggggcccctgcgcaagcgcagtgtggctgtggcgaaggccaagcccaagtttagcatctctccagattccttgtcc

SEQ ID NO: 150 - protein, 737 aa, Artificial sequence [sequence omitted]

SEQ ID NO: 151 - DNA, 2103 bp, Artificial sequence
  hybrid sequence
  CDS (1)..(2103)
atggattatcaagtgtcaagtccaatctatgacatcaattattatacatcggagccctgccaaaaaatcaatgtgaagcaaatcgcagcccgcctcctgcctccgctctactcactggtgttcatctttggttttgtgggcaacatgctggtcatcctcatcctgataaactgcaaaaggctgaagagcatgactgacatctacctgctcaacctggccatctctgacctgtttttccttcttactgtccccttctgggctcactatgctgccgcccagtgggactttggaaatacaatgtgtcaactcttgacagggctctattttataggcttcttctctggaatcttcttcatcatcctcctgacaatcgataggtacctggctgtcgtccatgctgtgtttgctttaaaagccaggacggtcacctttggggtggtgacaagtgtgatcacttgggtggtggctgtgtttgcgtctctcccaggaatcatctttaccagatctcaaaaagaaggtcttcattacacctgcagctctcattttccatacagtcagtatcaattctggaagaatttccagacattaaagatagtcatcttggggctggtcctgccgctgcttgtcatggtcatctgctactcgggaatcctaaaaactctgcttcggtgtcgaaatgagaagaagaggcacagggctgtgaggcttatcttcaccatcatgattgtttattttctcttctgggctccctacaacattgtccttctcctgaacaccttccaggaattctttggcctgaataattgcagtagctctaacaggttggaccaagctatgcaggtgacagagactcttgggatgacgcactgctgcatcaaccccatcatctatgcctttgtcggggagaagttcagaaactacctcttagtcttcttccaaaagcacattgccaaacgcttctgcaaatgctgttctattttccagcaagaggctcccgagcgagcaagctcagtttacacccgatccactggggagcaggaaatatctgtgggcttgtaccgtactcgagagaggagggcccgcttcgtgtccaagaaaggcaactgcaacgtcgcccacaagaacattcgagagcagggccgcttcctgcaggatgtgttcaccacgctggtggacctcaaatggccacacactctgctcattttcaccatgtccttcctgtgcagctggctgctctttgccatggtctggtggctcatcgccttcgcccacggtgatctctatgcttacatggagaaaggcatcacggacctggccccctacccatacgatgtaccagattacgccggagagggcaccaatgtgccctgcgtcacaagcatccactccttttcatctgccttccttttctccatcgaggtccaggtgaccattggtttcggcgggcgcatggtgacagaggaatgtcccctggccatcctcattctcattgtgcagaatatcgtcgggctgatgatcaacgccatcatgctgggctgcatcttcatgaaaacggcccaggcacatcggcgggcagaaaccctcatcttcagcaagcatgctgtgatcaccctgcgccatggccgcctgtgcttcatgctgcgcgtaggggacctccgaaagagcatgatcattagcgccaccatccacatgcaggtggtgcgcaagaccaccagccccgagggcgaagttgtgcctctccaccaggtagacatccccatggagaatggcgtgggtggtaacggcatcttcctggtggccccactcatcatctaccacgtcatcgactccaacagcccgctctacgacctggctcctagtgacctgcaccaccaccaggacctggagatcattgtcatcttggaaggcgtggtagaaaccacgggcatcaccacccaggcccgcacctcctacctagctgacgagattctatgggggcagcgctttgtccccattgtggccgaggaggacggccgctattctgtggactactccaaatttggtaacaccattaaagtgcccacaccactctgcacagcccgccagcttgatgaggaccgcagt

SEQ ID NO: 152 - protein, 701 aa, Artificial sequence
  Synthetic Construct
MDYQVSSPIYDINYYTSEPCQKINVKQIAARLLPPLYSLVFIFGFVGNMLVILILINCKRLKSMTDIYLLNLAISDLFFLLTVPFWAHYAAAQWDFGNTMCQLLTGLYFIGFFSGIFFIILLTIDRYLAVVHAVFALKARTVTFGVVTSVITWVVAVFASLPGIIFTRSQKEGLHYTCSSHFPYSQYQFWKNFQTLKIVILGLVLPLLVMVICYSGILKTLLRCRNEKKRHRAVRLIFTIMIVYFLFWAPYNIVLLLNTFQEFFGLNNCSSSNRLDQAMQVTETLGMTHCCINPIIYAFVGEKFRNYLLVFFQKHIAKRFCKCCSIFQQEAPERASSVYTRSTGEQEISVGLYRTRERRARFVSKKGNCNVAHKNIREQGRFLQDVFTTLVDLKWPHTLLIFTMSFLCSWLLFAMVWWLIAFAHGDLYAYMEKGITDLAPYPYDVPDYAGEGTNVPCVTSIHSFSSAFLFSIEVQVTIGFGGRMVTEECPLAILILIVQNIVGLMINAIMLGCIFMKTAQAHRRAETLIFSKHAVITLRHGRLCFMLRVGDLRKSMIISATIHMQVVRKTTSPEGEVVPLHQVDIPMENGVGGNGIFLVAPLIIYHVIDSNSPLYDLAPSDLHHHQDLEIIVILEGVVETTGITTQARTSYLADEILWGQRFVPIVAEEDGRYSVDYSKFGNTIKVPTPLCTARQLDEDRS

SEQ ID NO: 153 - DNA, 2151 bp, Artificial sequence
  hybrid sequence
  CDS (1)..(2151)
atggattatcaagtgtcaagtccaatctatgacatcaattattatacatcggagccctgccaaaaaatcaatgtgaagcaaatcgcagcccgcctcctgcctccgctctactcactggtgttcatctttggttttgtgggcaacatgctggtcatcctcatcctgataaactgcaaaaggctgaagagcatgactgacatctacctgctcaacctggccatctctgacctgtttttccttcttactgtccccttctgggctcactatgctgccgcccagtgggactttggaaatacaatgtgtcaactcttgacagggctctattttataggcttcttctctggaatcttcttcatcatcctcctgacaatcgataggtacctggctgtcgtccatgctgtgtttgctttaaaagccaggacggtcacctttggggtggtgacaagtgtgatcacttgggtggtggctgtgtttgcgtctctcccaggaatcatctttaccagatctcaaaaagaaggtcttcattacacctgcagctctcattttccatacagtcagtatcaattctggaagaatttccagacattaaagatagtcatcttggggctggtcctgccgctgcttgtcatggtcatctgctactcgggaatcctaaaaactctgcttcggtgtcgaaatgagaagaagaggcacagggctgtgaggcttatcttcaccatcatgattgtttattttctcttctgggctccctacaacattgtccttctcctgaacaccttccaggaattctttggcctgaataattgcagtagctctaacaggttggaccaagctatgcaggtgacagagactcttgggatgacgcactgctgcatcaaccccatcatctatgcctttgtcggggagaagttcagaaactacctcttagtcttcttccaaaagcacattgccaaacgcttctgcaaatgctgttctattttccagcaagaggctcccgagcgagcaagctcagtttacacccgatccactggggagcaggaaatatctgtgggcttgtaccgtactcgagagaggagggcccgcttcgtgtccaagaaaggcaactgcaacgtcgcccacaagaacattcgagagcagggccgcttcctgcaggatgtgttcaccacgctggtggacctcaaatggccacacactctgctcattttcaccatgtccttcctgtgcagctggctgctctttgccatggtctggtggctcatcgccttcgcccacggtgacctggcccccggagagggcaccaatgtgccctgcgtcacaagcatccactccttttcatctgccttccttttctccatcgaggtccaggtgaccattggtttcggcgggcgcatggtgacagaggaatgtcccctggccatcctcattctcattgtgcagaatatcgtcgggctgatgatcaacgccatcatgctgggctgcatcttcatgaaaacggcccaggcacatcggcgggcagaaaccctcatcttcagcaagcatgctgtgatcaccctgcgccatggccgcctgtgcttcatgctgcgcgtaggggacctccgaaagagcatgatcattagcgccaccatccacatgcaggtggtgcgcaagaccaccagccccgagggcgaagttgtgcctctccaccaggtagacatccccatggagaatggcgtgggtggtaacggcatcttcctggtggccccactcatcatctaccacgtcatcgactccaacagcccgctctacgacctggctcctagtgacctgcaccaccaccaggacctggagatcattgtcatcttggaaggcgtggtagaaaccacgggcatcaccacccaggcccgcacctcctacctagctgacgagattctatgggggcagcgctttgtccccattgtggccgaggaggacggccgctattctgtggactactccaaatttggtaacaccattaaagtgcccacaccactctgcacagcccgccagcttgatgaggaccgcagtctgctggatgccctgaccctcgcctcgtcgcgggggcccctgcgcaagcgcagtgtggctgtggcgaaggccaagcccaagtttagcatctctccagattccttgtcc

SEQ ID NO: 154 - protein, 717 aa, Artificial sequence
  Synthetic Construct
MDYQVSSPIYDINYYTSEPCQKINVKQIAARLLPPLYSLVFIFGFVGNMLVILILINCKRLKSMTDIYLLNLAISDLFFLLTVPFWAHYAAAQWDFGNTMCQLLTGLYFIGFFSGIFFIILLTIDRYLAVVHAVFALKARTVTFGVVTSVITWVVAVFASLPGIIFTRSQKEGLHYTCSSHFPYSQYQFWKNFQTLKIVILGLVLPLLVMVICYSGILKTLLRCRNEKKRHRAVRLIFTIMIVYFLFWAPYNIVLLLNTFQEFFGLNNCSSSNRLDQAMQVTETLGMTHCCINPIIYAFVGEKFRNYLLVFFQKHIAKRFCKCCSIFQQEAPERASSVYTRSTGEQEISVGLYRTRERRARFVSKKGNCNVAHKNIREQGRFLQDVFTTLVDLKWPHTLLIFTMSFLCSWLLFAMVWWLIAFAHGDLAPGEGTNVPCVTSIHSFSSAFLFSIEVQVTIGFGGRMVTEECPLAILILIVQNIVGLMINAIMLGCIFMKTAQAHRRAETLIFSKHAVITLRHGRLCFMLRVGDLRKSMIISATIHMQVVRKTTSPEGEVVPLHQVDIPMENGVGGNGIFLVAPLIIYHVIDSNSPLYDLAPSDLHHHQDLEIIVILEGVVETTGITTQARTSYLADEILWGQRFVPIVAEEDGRYSVDYSKFGNTIKVPTPLCTARQLDEDRSLLDALTLASSRGPLRKRSVAVAKAKPKFSISPDSLS

SEQ ID NO: 155 - DNA, 2043 bp, Artificial sequence
  hybrid sequence
  CDS (1)..(2043)
atggattatcaagtgtcaagtccaatctatgacatcaattattatacatcggagccctgccaaaaaatcaatgtgaagcaaatcgcagcccgcctcctgcctccgctctactcactggtgttcatctttggttttgtgggcaacatgctggtcatcctcatcctgataaactgcaaaaggctgaagagcatgactgacatctacctgctcaacctggccatctctgacctgtttttccttcttactgtccccttctgggctcactatgctgccgcccagtgggactttggaaatacaatgtgtcaactcttgacagggctctattttataggcttcttctctggaatcttcttcatcatcctcctgacaatcgataggtacctggctgtcgtccatgctgtgtttgctttaaaagccaggacggtcacctttggggtggtgacaagtgtgatcacttgggtggtggctgtgtttgcgtctctcccaggaatcatctttaccagatctcaaaaagaaggtcttcattacacctgcagctctcattttccatacagtcagtatcaattctggaagaatttccagacattaaagatagtcatcttggggctggtcctgccgctgcttgtcatggtcatctgctactcgggaatcctaaaaactctgcttcggtgtcgaaatgagaagaagaggcacagggctgtgaggcttatcttcaccatcatgattgtttattttctcttctgggctccctacaacattgtccttctcctgaacaccttccaggaattctttggcctgaataattgcagtagctctaacaggttggaccaagctatgcaggtgacagagactcttgggatgacgcactgctgcatcaaccccatcatctatgcctttgtcggggagaagttcagaaactacctcttagtcttcttccaaaagcacattgccaaacgcttctgcaaatgctgttctattttccagcaagaggctcccgagcgagcaagctcagtttacacccgatccactggggagcaggaaatatctgtgggcttgtaccgtactcgagagaggagggcccgcttcgtgtccaagaaaggcaactgcaacgtcgcccacaagaacattcgagagcagggccgcttcctgcaggatgtgttcaccacgctggtggacctcaaatggccacacactctgctcattttcaccatgtccttcctgtgcagctggctgctctttgccatggtctggtggctcatcgccttcgcccacggtgacctggcccccggagagggcaccaatgtgccctgcgtcacaagcatccactccttttcatctgccttccttttctccatcgaggtccaggtgaccattggtttcggcgggcgcatggtgacagaggaatgtcccctggccatcctcattctcattgtgcagaatatcgtcgggctgatgatcaacgccatcatgctgggctgcatcttcatgaaaacggcccaggcacatcggcgggcagaaaccctcatcttcagcaagcatgctgtgatcaccctgcgccatggccgcctgtgcttcatgctgcgcgtaggggacctccgaaagagcatgatcattagcgccaccatccacatgcaggtggtgcgcaagaccaccagccccgagggcgaagttgtgcctctccaccaggtagacatccccatggagaatggcgtgggtggtaacggcatcttcctggtggccccactcatcatctaccacgtcatcgactccaacagcccgctctacgacctggctcctagtgacctgcaccaccaccaggacctggagatcattgtcatcttggaaggcgtggtagaaaccacgggcatcaccacccaggcccgcacctcctacctagctgacgagattctatgggggcagcgctttgtccccattgtggccgaggaggacggccgctattctgtggactactccaaatttggtaacaccattaaagtgcccacaccactctgcacagcccgccagcttgatgaggaccgcagt

SEQ ID NO: 156 - protein, 681 aa, Artificial sequence
  Synthetic Construct
MDYQVSSPIYDINYYTSEPCQKINVKQIAARLLPPLYSLVFIFGFVGNMLVILILINCKRLKSMTDIYLLNLAISDLFFLLTVPFWAHYAAAQWDFGNTMCQLLTGLYFIGFFSGIFFIILLTIDRYLAVVHAVFALKARTVTFGVVTSVITWVVAVFASLPGIIFTRSQKEGLHYTCSSHFPYSQYQFWKNFQTLKIVILGLVLPLLVMVICYSGILKTLLRCRNEKKRHRAVRLIFTIMIVYFLFWAPYNIVLLLNTFQEFFGLNNCSSSNRLDQAMQVTETLGMTHCCINPIIYAFVGEKFRNYLLVFFQKHIAKRFCKCCSIFQQEAPERASSVYTRSTGEQEISVGLYRTRERRARFVSKKGNCNVAHKNIREQGRFLQDVFTTLVDLKWPHTLLIFTMSFLCSWLLFAMVWWLIAFAHGDLAPGEGTNVPCVTSIHSFSSAFLFSIEVQVTIGFGGRMVTEECPLAILILIVQNIVGLMINAIMLGCIFMKTAQAHRRAETLIFSKHAVITLRHGRLCFMLRVGDLRKSMIISATIHMQVVRKTTSPEGEVVPLHQVDIPMENGVGGNGIFLVAPLIIYHVIDSNSPLYDLAPSDLHHHQDLEIIVILEGVVETTGITTQARTSYLADEILWGQRFVPIVAEEDGRYSVDYSKFGNTIKVPTPLCTARQLDEDRS

SEQ ID NO: 157 - DNA, 27 bp, ARTIFICIAL SEQUENCE
  hybrid sequence
  CDS (1)..(27)
tacccatacgatgtaccagattacgcc

SEQ ID NO: 158 - protein, 9 aa, ARTIFICIAL SEQUENCE
  Synthetic Construct
YPYDVPDYA

SEQ ID NO: 159 - DNA, 15 bp, ARTIFICIAL SEQUENCE
  hybrid sequence
  CDS (1)..(15)
cgacgccggcgtaga

SEQ ID NO: 160 - protein, 5 aa, ARTIFICIAL SEQUENCE
  Synthetic Construct
RRRRR

SEQ ID NO: 161 - DNA, 18 bp, ARTIFICIAL SEQUENCE
  hybrid sequence
  CDS (1)..(18)
catcaccatcaccatcac

SEQ ID NO: 162 - protein, 6 aa, ARTIFICIAL SEQUENCE
  Synthetic Construct
HHHHHH

SEQ ID NO: 163 - DNA, 30 bp, ARTIFICIAL SEQUENCE
  hybrid sequence
  CDS (1)..(30)
gaacaaaaactaatatcagaagaggacctc

SEQ ID NO: 164 - protein, 10 aa, ARTIFICIAL SEQUENCE
  Synthetic Construct
EQKLISEEDL

SEQ ID NO: 165 - DNA, 24 bp, ARTIFICIAL SEQUENCE
  hybrid sequence
  CDS (1)..(24)
tggtcacacccacaattcgaaaaa

SEQ ID NO: 166 - protein, 8 aa, ARTIFICIAL SEQUENCE
  Synthetic Construct
WSHPQFEK

SEQ ID NO: 167 - DNA, 24 bp, ARTIFICIAL SEQUENCE
  hybrid sequence
  CDS (1)..(24)
gactacaaagacgatgacgataag

SEQ ID NO: 168 - protein, 8 aa, ARTIFICIAL SEQUENCE
  Synthetic Construct
DYKDDDDK

SEQ ID NO: 169 - DNA, 45 bp, ARTIFICIAL SEQUENCE
  hybrid sequence
  CDS (1)..(45)
aaagaaacagcagccgcgaaattcgaacgacaacacatggactca

SEQ ID NO: 170 - protein, 15 aa, ARTIFICIAL SEQUENCE
  Synthetic Construct
KETAAAKFERQHMDS

SEQ ID NO: 171 - DNA, 57 bp, ARTIFICIAL SEQUENCE
  hybrid sequence
  CDS (1)..(57)
aaagaccacctaatacacaacgtacacaaagaattccatgcacacgcgcataataag

SEQ ID NO: 172 - protein, 19 aa, ARTIFICIAL SEQUENCE
  Synthetic Construct
KDHLIHNVHKEFHAHAHNK

SEQ ID NO: 173 - DNA, 66 bp, ARTIFICIAL SEQUENCE
  hybrid sequence
  CDS (1)..(66)
gactacaaagaccacgacggagactacaaagaccatgacatagattataaggacgatgacgataaa

SEQ ID NO: 174 - protein, 22 aa, ARTIFICIAL SEQUENCE
  Synthetic Construct
DYKDHDGDYKDHDIDYKDDDDK

SEQ ID NO: 175 - DNA, 78 bp, ARTIFICIAL SEQUENCE
  hybrid sequence
  CDS (1)..(78)
aaacgacggtggaaaaagaacttcatagcagtatcagccgcgaaccgattcaaaaagatctcatcctcgggagcatta

SEQ ID NO: 176 - protein, 26 aa, ARTIFICIAL SEQUENCE
  Synthetic Construct
KRRWKKNFIAVSAANRFKKISSSGAL

SEQ ID NO: 177 - DNA, 87 bp, ARTIFICIAL SEQUENCE
  hybrid sequence
  CDS (1)..(87)
cgagtaggaatatacctatgcataaaactaaaacacacaaaaaaacgacaaatatacacagacatagaaatgaaccgactaggaaaa

SEQ ID NO: 178 - protein, 29 aa, ARTIFICIAL SEQUENCE
  Synthetic Construct
RVGIYLCIKLKHTKKRQIYTDIEMNRLGK

SEQ ID NO: 179 - DNA, 114 bp, ARTIFICIAL SEQUENCE
  hybrid sequence
  CDS (1)..(114)
atggacgaaaaaacaaccggatggcgagggggtcacgtagtggaaggcctagcaggagaactagagcaactccgagcgcgtcttgaacaccatccacaaggacagcgagaacct

SEQ ID NO: 180 - protein, 38 aa, ARTIFICIAL SEQUENCE
  Synthetic Construct
MDEKTTGWRGGHVVEGLAGELEQLRARLEHHPQGQREP

SEQ ID NO: 181 - DNA, 153 bp, ARTIFICIAL SEQUENCE
  hybrid sequence
  CDS (1)..(153)
acaaacccaggagtatcagcatggcaagtaaacacagcatacacagccggacaactagtcacatacaacggaaaaacatacaaatgcctacaaccacacacatcactagcaggatgggaaccatcaaacgtaccagcactatggcaactacaa

SEQ ID NO: 182 - protein, 51 aa, ARTIFICIAL SEQUENCE
  Synthetic Construct
TNPGVSAWQVNTAYTAGQLVTYNGKTYKCLQPHTSLAGWEPSNVPALWQLQ

SEQ ID NO: 183 - DNA, 621 bp, ARTIFICIAL SEQUENCE
  hybrid sequence
  CDS (1)..(621)
gtgaagcttatctatttcaacggacgtggacgtgctgaaccgatccgcatgattcttgtggcagcgggagtagaattcgaagatgaaaggattgaattccaagattggcctaaaatcaaaccaaccatacctggaggaagattgcctatcgtgaaaatcacagacaaaaggggggatgttaaaacaatgtcagagagtttggctattgcacgatttatagcgcgaaaacacaacatgatgggcgatacagacgatgagtattatatcatagagaagatgattggccaagtcgaagatgttgaaagtgaataccataagactctcataaagccaccagaagaaaaagagaaaatctccaaggagatattgaacggtaaagttcccattcttctccaagcaatttgtgaaaccttaaaagagtctacaggtaatctgactgtcggagataaggtcactctggctgatgtagttctgattgcttccattgatcatataactgatttggataaggaatttttaactggcaagtatcctgagattcacaaacatcgtaaacatctattggccacttcaccaaaactggcgaaatacttatcagagagacatgcaacggcattttaa

SEQ ID NO: 184 - protein, 206 aa, ARTIFICIAL SEQUENCE [sequence omitted]

SEQ ID NO: 185 - DNA, 1191 bp, ARTIFICIAL SEQUENCE
  hybrid sequence
  CDS (1)..(1191)
atgaaaataaaaacaggtgcacgcatcctcgcattatccgcattaacgacgatgatgttttccgcctcggctctcgccaaaatcgaagaaggtaaactggtaatctggattaacggcgataaaggctataacggtctcgctgaagtcggtaagaaattcgagaaagataccggaattaaagtcaccgttgagcatccggataaactggaagagaaattcccacaggttgcggcaactggcgatggccctgacattatcttctgggcacacgaccgctttggtggctacgctcaatctggcctgttggctgaaatcaccccggacaaagcgttccaggacaagctgtatccgtttacctgggatgccgtacgttacaacggcaagctgattgcttacccgatcgctgttgaagcgttatcgctgatttataacaaagatctgctgccgaacccgccaaaaacctgggaagagatcccggcgctggataaagaactgaaagcgaaaggtaagagcgcgctgatgttcaacctgcaagaaccgtacttcacctggccgctgattgctgctgacgggggttatgcgttcaagtatgaaaacggcaagtacgacattaaagacgtgggcgtggataacgctggcgcgaaagcgggtctgaccttcctggttgacctgattaaaaacaaacacatgaatgcagacaccgattactccatcgcagaagctgcctttaataaaggcgaaacagcgatgaccatcaacggcccgtgggcatggtccaacatcgacaccagcaaagtgaattatggtgtaacggtactgccgaccttcaagggtcaaccatccaaaccgttcgttggcgtgctgagcgcaggtattaacgccgccagtccgaacaaagagctggcgaaagagttcctcgaaaactatctgctgactgatgaaggtctggaagcggttaataaagacaaaccgctgggtgccgtagcgctgaagtcttacgaggaagagttggcgaaagatccacgtattgccgccaccatggaaaacgcccagaaaggtgaaatcatgccgaacatcccgcagatgtccgctttctggtatgccgtgcgtactgcggtgatcaacgccgccagcggtcgtcagactgtcgatgaagccctgaaagacgcgcagactcgtatcaccaagtaa

SEQ ID NO: 186 - protein, 396 aa, ARTIFICIAL SEQUENCE
  Synthetic Construct
MKIKTGARILALSALTTMMFSASALAKIEEGKLVIWINGDKGYNGLAEVGKKFEKDTGIKVTVEHPDKLEEKFPQVAATGDGPDIIFWAHDRFGGYAQSGLLAEITPDKAFQDKLYPFTWDAVRYNGKLIAYPIAVEALSLIYNKDLLPNPPKTWEEIPALDKELKAKGKSALMFNLQEPYFTWPLIAADGGYAFKYENGKYDIKDVGVDNAGAKAGLTFLVDLIKNKHMNADTDYSIAEAAFNKGETAMTINGPWAWSNIDTSKVNYGVTVLPTFKGQPSKPFVGVLSAGINAASPNKELAKEFLENYLLTDEGLEAVNKDKPLGAVALKSYEEELAKDPRIAATMENAQKGEIMPNIPQMSAFWYAVRTAVINAASGRQTVDEALKDAQTRITK

SEQ ID NO: 187 - DNA, 717 bp, ARTIFICIAL SEQUENCE
  hybrid sequence
  CDS (1)..(717)
atgagtaaaggagaagaacttttcactggagttgtcccaattcttgttgaattagatggtgatgttaatgggcacaaattttctgtcagtggagagggtgaaggtgatgcaacatacggaaaacttacccttaaatttatttgcactactggaaaactacctgttccatggccaacacttgtcactactttctcttatggtgttcaatgcttttcaagatacccagatcatatgaaacagcatgactttttcaagagtgccatgcccgaaggttatgtacaggaaagaactatatttttcaaagatgacgggaactacaagacacgtgctgaagtcaagtttgaaggtgatacccttgttaatagaatcgagttaaaaggtattgattttaaagaagatggaaacattcttggacacaaattggaatacaactataactcacacaatgtatacatcatggcagacaaacaaaagaatggaatcaaagttaacttcaaaattagacacaacattgaagatggaagcgttcaactagcagaccattatcaacaaaatactccaattggcgatggccctgtccttttaccagacaaccattacctgtccacacaatctgccctttcgaaagatcccaacgaaaagagagaccacatggtccttcttgagtttgtaacagctgctgggattacacatggcatggatgaactatacaaataa

SEQ ID NO: 188 - protein, 238 aa, ARTIFICIAL SEQUENCE
  Synthetic Construct
MSKGEELFTGVVPILVELDGDVNGHKFSVSGEGEGDATYGKLTLKFICTTGKLPVPWPTLVTTFSYGVQCFSRYPDHMKQHDFFKSAMPEGYVQERTIFFKDDGNYKTRAEVKFEGDTLVNRIELKGIDFKEDGNILGHKLEYNYNSHNVYIMADKQKNGIKVNFKIRHNIEDGSVQLADHYQQNTPIGDGPVLLPDNHYLSTQSALSKDPNEKRDHMVLLEFVTAAGITHGMDELYK

SEQ ID NO: 189 - DNA, 678 bp, ARTIFICIAL SEQUENCE
  hybrid sequence
  CDS (1)..(678)
atgaggtcttccaagaatgttatcaaggagttcatgaggtttaaggttcgcatggaaggaacggtcaatgggcacgagtttgaaatagaaggcgaaggagaggggaggccatacgaaggccacaataccgtaaagcttaaggtaaccaaggggggacctttgccatttgcttgggatattttgtcaccacaatttcagtatggaagcaaggtatatgtcaagcaccctgccgacataccagactataaaaagctgtcatttcctgaaggatttaaatgggaaagggtcatgaactttgaagacggtggcgtcgttactgtaacccaggattccagtttgcaggatggctgtttcatctacaaggtcaagttcattggcgtgaactttccttccgatggacctgttatgcaaaagaagacaatgggctgggaagccagcactgagcgtttgtatcctcgtgatggcgtgttgaaaggagagattcataaggctctgaagctgaaagacggtggtcattacctagttgaattcaaaagtatttacatggcaaagaagcctgtgcagctaccagggtactactatgttgactccaaactggatataacaagccacaacgaagactatacaatcgttgagcagtatgaaagaaccgagggacgccaccatctgttcctttaa

SEQ ID NO: 190 - protein, 225 aa, ARTIFICIAL SEQUENCE
  Synthetic Construct
MRSSKNVIKEFMRFKVRMEGTVNGHEFEIEGEGEGRPYEGHNTVKLKVTKGGPLPFAWDILSPQFQYGSKVYVKHPADIPDYKKLSFPEGFKWERVMNFEDGGVVTVTQDSSLQDGCFIYKVKFIGVNFPSDGPVMQKKTMGWEASTERLYPRDGVLKGEIHKALKLKDGGHYLVEFKSIYMAKKPVQLPGYYYVDSKLDITSHNEDYTIVEQYERTEGRHHLFL

SEQ ID NO: 191 - DNA, 585 bp, ARTIFICIAL SEQUENCE
  hybrid sequence
  CDS (1)..(585)
atgtttaaaggtatagtagaaggtataggaatcattgaaaaaattgatatatatactgacctagataagtatgcaattcgatttcctgaaaatatgttgaatggaattaaaaaggagtcgtcaataatgtttaacggatgcttcttaacggtaactagcgtgaattcaaacattgtctggtttgatatatttgaaaaagaagcacgtaagcttgatacttttcgggaatataaggtaggtgaccgagtaaatttaggaacattcccaaaatttggcgctgcatctggtgggcatatattatcagcaaggatttcatgtgtagcaagtattattgaaataatagaaaatgaggattatcaacaaatgtggattcaaattcctgaaaattttacagagtttcttattgataaagactatattgctgtggatggtattagcttaactattgacactataaaaaacaaccaatttttcattagtttacccttaaaaatagcacaaaatacaaatatgaaatggcgaaaaaaaggtgataaggtaaatgttgagttatcaaacaaaattaatgctaaccagtgttggtaa

SEQ ID NO: 192 - protein, 194 aa, ARTIFICIAL SEQUENCE
  Synthetic Construct
MFKGIVEGIGIIEKIDIYTDLDKYAIRFPENMLNGIKKESSIMFNGCFLTVTSVNSNIVWFDIFEKEARKLDTFREYKVGDRVNLGTFPKFGAASGGHILSARISCVASIIEIIENEDYQQMWIQIPENFTEFLIDKDYIAVDGISLTIDTIKNNQFFISLPLKIAQNTNMKWRKKGDKVNVELSNKINANQCW

SEQ ID NO: 193 - DNA, 696 bp, ARTIFICIAL SEQUENCE
  hybrid sequence
  CDS (1)..(696)
atgtcttattcaaagcaaggcatcgcacaagtaatgaagacgaaataccatatggaaggcagtgtcaatggccatgaattcacgatcgaaggtgtaggaactggaaacccttacgaaggcacacagatgtccgaattagtgatcaccaagcctgcaggaaaaccccttccattctcctttgacattctgtcaacagtctttcaatatggaaacaggtgcttcacaaagtaccctgaaggaatgactgactatttcaagcaagcattcccagatggaatgtcatatgaaaggtcatttctatatgaggatggaggagttgctacagccggctggaacattggtcttgagagagattgcttcatccacaaatccatctatcatggcgttaactttcccgctgatggacccgtaatgaaaaagaagaccattggctgggataaagccttcgaaaaaatgactgtgtccaaagacgtgttaagaggtgatgtgactgggtttcttatgctcgaaggaggtggttaccacagctgccagtttcactccacttacaaaccagaaaagccggctgcactgcccccgaatcatgtcgtagaacatcacattgtgaggactgaccttggccaaagtgcaaaaggcttcacagtcaagctggaagaacatgctgcggctcatgttaaccctttgaaggttcaataa

SEQ ID NO: 194 - protein, 231 aa, ARTIFICIAL SEQUENCE
  Synthetic Construct
MSYSKQGIAQVMKTKYHMEGSVNGHEFTIEGVGTGNPYEGTQMSELVITKPAGKPLPFSFDILSTVFQYGNRCFTKYPEGMTDYFKQAFPDGMSYERSFLYEDGGVATAGWNIGLERDCFIHKSIYHGVNFPADGPVMKKKTIGWDKAFEKMTVSKDVLRGDVTGFLMLEGGGYHSCQFHSTYKPEKPAALPPNHVVEHHIVRTDLGQSAKGFTVKLEEHAAAHVNPLKVQ

SEQ ID NO: 195 - DNA, 18 bp, ARTIFICIAL SEQUENCE
  hybrid sequence
  CDS (1)..(18)
ggaggtggaggtggaggc

SEQ ID NO: 196 - protein, 6 aa, ARTIFICIAL SEQUENCE
  Synthetic Construct
GGGGGG

SEQ ID NO: 197 - DNA, 2178 bp, Artificial sequence
  hybrid sequence
  CDS (1)..(2178)
atggggcaacccgggaacggcagcgccttcttgctggcacccaatggaagccatgcgccggaccacgacgtcacgcagcaaagggacgaggtgtgggtggtgggcatgggcatcgtcatgtctctcatcgtcctggccatcgtgtttggcaatgtgctggtcatcacagccattgccaagttcgagcgtctgcagacggtcaccaactacttcatcacttcactggcctgtgctgatctggtcatgggcctagcagtggtgccctttggggccgcccatattcttatgaaaatgtggacttttggcaacttctggtgcgagttttggacttccattgatgtgctgtgcgtcacggccagcattgagaccctgtgcgtgatcgcagtggatcgctactttgccattacttcacctttcaagtaccagagcctgctgaccaagaataaggcccgggtgatcattctgatggtgtggattgtgtcaggccttacctccttcttgcccattcagatgcactggtacagggccacccaccaggaagccatcaactgctatgccaatgagacctgctgtgacttcttcacgaaccaagcctatgccattgcctcttccatcgtgtccttctacgttcccctggtgatcatggtcttcgtctactccagggtctttcaggaggccaaaaggcagctccagaagattgacaaatctgagggccgcttccatgtccagaaccttagccaggtggagcaggatgggcggacggggcatggactccgcagatcttccaagttctgcttgaaggagcacaaagccctcaagacgttaggcatcatcatgggcactttcaccctctgctggctgcccttcttcatcgttaacattgtgcatgtgatccaggataacctcatccgtaaggaagtttacatcctcctaaattggataggctatgtcaattctggtttcaatccccttatctactgccggagcccagatttcaggattgccttccaggagcttctgtgctaccgtactcgagagaggagggcccgcttcgtgtccaagaaaggcaactgcaacgtcgcccacaagaacattcgagagcagggccgcttcctgcaggatgtgttcaccacgctggtggacctcaaatggccacacactctgctcattttcaccatgtccttcctgtgcagctggctgctctttgccatggtctggtggctcatcgccttcgcccacggtgatctctatgcttacatggagaaaggcatcacggacctggccccctacccatacgatgtaccagattacgccggagagggcaccaatgtgccctgcgtcacaagcatccactccttttcatctgccttccttttctccatcgaggtccaggtgaccattggtttcggcgggcgcatggtgacagaggaatgtcccctggccatcctcattctcattgtgcagaatatcgtcgggctgatgatcaacgccatcatgctgggctgcatcttcatgaaaacggcccaggcacatcggcgggcagaaaccctcatcttcagcaagcatgctgtgatcaccctgcgccatggccgcctgtgcttcatgctgcgcgtaggggacctccgaaagagcatgatcattagcgccaccatccacatgcaggtggtgcgcaagaccaccagccccgagggcgaagttgtgcctctccaccaggtagacatccccatggagaatggcgtgggtggtaacggcatcttcctggtggccccactcatcatctaccacgtcatcgactccaacagcccgctctacgacctggctcctagtgacctgcaccaccaccaggacctggagatcattgtcatcttggaaggcgtggtagaaaccacgggcatcaccacccaggcccgcacctcctacctagctgacgagattctatgggggcagcgctttgtccccattgtggccgaggaggacggccgctattctgtggactactccaaatttggtaacaccattaaagtgcccacaccactctgcacagcccgccagcttgatgaggaccgcagtctgctggatgccctgaccctcgcctcgtcgcgggggcccctgcgcaagcgcagtgtggctgtggcgaaggccaagcccaagtttagcatctctccagattccttgtcc

SEQ ID NO: 198 - protein, 726 aa, Artificial sequence
  Synthetic Construct
MGQPGNGSAFLLAPNGSHAPDHDVTQQRDEVWVVGMGIVMSLIVLAIVFGNVLVITAIAKFERLQTVTNYFITSLACADLVMGLAVVPFGAAHILMKMWTFGNFWCEFWTSIDVLCVTASIETLCVIAVDRYFAITSPFKYQSLLTKNKARVIILMVWIVSGLTSFLPIQMHWYRATHQEAINCYANETCCDFFTNQAYAIASSIVSFYVPLVIMVFVYSRVFQEAKRQLQKIDKSEGRFHVQNLSQVEQDGRTGHGLRRSSKFCLKEHKALKTLGIIMGTFTLCWLPFFIVNIVHVIQDNLIRKEVYILLNWIGYVNSGFNPLIYCRSPDFRIAFQELLCYRTRERRARFVSKKGNCNVAHKNIREQGRFLQDVFTTLVDLKWPHTLLIFTMSFLCSWLLFAMVWWLIAFAHGDLYAYMEKGITDLAPYPYDVPDYAGEGTNVPCVTSIHSFSSAFLFSIEVQVTIGFGGRMVTEECPLAILILIVQNIVGLMINAIMLGCIFMKTAQAHRRAETLIFSKHAVITLRHGRLCFMLRVGDLRKSMIISATIHMQVVRKTTSPEGEVVPLHQVDIPMENGVGGNGIFLVAPLIIYHVIDSNSPLYDLAPSDLHHHQDLEIIVILEGVVETTGITTQARTSYLADEILWGQRFVPIVAEEDGRYSVDYSKFGNTIKVPTPLCTARQLDEDRSLLDALTLASSRGPLRKRSVAVAKAKPKFSISPDSLS

SEQ ID NO: 199 - DNA, 2571 bp, Artificial sequence
  hybrid sequence
  CDS (1)..(2571)
atgaagtcgatcctagatggccttgcagataccaccttccgcaccatcaccactgacctcctgtacgtgggctcaaatgacattcagtacgaagacatcaaaggtgacatggcatccaaattagggtacttcccacagaaattccctttaacttcctttaggggaagtcccttccaagagaagatgactgcgggagacaacccccagctagtcccagcagaccaggtgaacattacagaattttacaacaagtctctctcgtccttcaaggagaatgaggagaacatccagtgtggggagaacttcatggacatagagtgtttcatggtcctgaaccccagccagcagctggccattgcagtcctgtccctcacgctgggcaccttcacggtcctggagaacctcctggtgctgtgcgtcatcctccactcccgcagcctccgctgcaggccttcctaccacttcatcggcagcctggcggtggcagacctcctggggagtgtcatttttgtctacagcttcattgacttccacgtgttccaccgcaaagatagccgcaacgtgtttctgttcaaactgggtggggtcacggcctccttcactgcctccgtgggcagcctgttcctcacagccatcgacaggtacatatccattcacaggcccctggcctataagaggattgtcaccaggcccaaggccgtggtggcgttttgcctgatgtggaccatagccattgtgatcgccgtgctgcctctcctgggctggaactgcgagaaactgcaatctgtttgctcagacattttcccacacattgatgaaacctacctgatgttctggatcggggtcaccagcgtactgcttctgttcatcgtgtatgcgtacatgtatattctctggaaggctcacagccacgccgtccgcatgattcagcgtggcacccagaagagcatcatcatccacacgtctgaggatgggaaggtacaggtgacccggccagaccaagcccgcatggacattaggttagccaagaccctggtcctgatcctggtggtgttgatcatctgctggggccctctgcttgcaatcatggtgtatgatgtctttgggaagatgaacaagctcattaagacggtgtttgcattctgcagtatgctctgcctgctgaactccaccgtgaaccccatcatctatgctctgaggagtaaggacctgcgacacgctttccggagcatgtttccctcttgtgaaggcactgcgcagcctctggataacagcatgggggactcggactgcctgcacaaacacgcaaacaatgcagccagtgttcacagggccgcagaaagctgcatcaagagcacagtcaagattgccaaggtaaccatgtctgtgtccacagacacgtctgccgaggctctgtaccgtactcgagagaggagggcccgcttcgtgtccaagaaaggcaactgcaacgtcgcccacaagaacattcgagagcagggccgcttcctgcaggatgtgttcaccacgctggtggacctcaaatggccacacactctgctcattttcaccatgtccttcctgtgcagctggctgctctttgccatggtctggtggctcatcgccttcgcccacggtgatctctatgcttacatggagaaaggcatcacggacctggccccctacccatacgatgtaccagattacgccggagagggcaccaatgtgccctgcgtcacaagcatccactccttttcatctgccttccttttctccatcgaggtccaggtgaccattggtttcggcgggcgcatggtgacagaggaatgtcccctggccatcctcattctcattgtgcagaatatcgtcgggctgatgatcaacgccatcatgctgggctgcatcttcatgaaaacggcccaggcacatcggcgggcagaaaccctcatcttcagcaagcatgctgtgatcaccctgcgccatggccgcctgtgcttcatgctgcgcgtaggggacctccgaaagagcatgatcattagcgccaccatccacatgcaggtggtgcgcaagaccaccagccccgagggcgaagttgtgcctctccaccaggtagacatccccatggagaatggcgtgggtggtaacggcatcttcctggtggccccactcatcatctaccacgtcatcgactccaacagcccgctctacgacctggctcctagtgacctgcaccaccaccaggacctggagatcattgtcatcttggaaggcgtggtagaaaccacgggcatcaccacccaggcccgcacctcctacctagctgacgagattctatgggggcagcgctttgtccccattgtggccgaggaggacggccgctattctgtggactactccaaatttggtaacaccattaaagtgcccacaccactctgcacagcccgccagcttgatgaggaccgcagtctgctggatgccctgaccctcgcctcgtcgcgggggcccctgcgcaagcgcagtgtggctgtggcgaaggccaagcccaagtttagcatctctccagattccttgtcc

SEQ ID NO: 200 - protein, 857 aa, Artificial sequence
  Synthetic Construct
MKSILDGLADTTFRTITTDLLYVGSNDIQYEDIKGDMASKLGYFPQKFPLTSFRGSPFQEKMTAGDNPQLVPADQVNITEFYNKSLSSFKENEENIQCGENFMDIECFMVLNPSQQLAIAVLSLTLGTFTVLENLLVLCVILHSRSLRCRPSYHFIGSLAVADLLGSVIFVYSFIDFHVFHRKDSRNVFLFKLGGVTASFTASVGSLFLTAIDRYISIHRPLAYKRIVTRPKAVVAFCLMWTIAIVIAVLPLLGWNCEKLQSVCSDIFPHIDETYLMFWIGVTSVLLLFIVYAYMYILWKAHSHAVRMIQRGTQKSIIIHTSEDGKVQVTRPDQARMDIRLAKTLVLILVVLIICWGPLLAIMVYDVFGKMNKLIKTVFAFCSMLCLLNSTVNPIIYALRSKDLRHAFRSMFPSCEGTAQPLDNSMGDSDCLHKHANNAASVHRAAESCIKSTVKIAKVTMSVSTDTSAEALYRTRERRARFVSKKGNCNVAHKNIREQGRFLQDVFTTLVDLKWPHTLLIFTMSFLCSWLLFAMVWWLIAFAHGDLYAYMEKGITDLAPYPYDVPDYAGEGTNVPCVTSIHSFSSAFLFSIEVQVTIGFGGRMVTEECPLAILILIVQNIVGLMINAIMLGCIFMKTAQAHRRAETLIFSKHAVITLRHGRLCFMLRVGDLRKSMIISATIHMQVVRKTTSPEGEVVPLHQVDIPMENGVGGNGIFLVAPLIIYHVIDSNSPLYDLAPSDLHHHQDLEIIVILEGVVETTGITTQARTSYLADEILWGQRFVPIVAEEDGRYSVDYSKFGNTIKVPTPLCTARQLDEDRSLLDALTLASSRGPLRKRSVAVAKAKPKFSISPDSLS

SEQ ID NO: 201 - DNA, 2427 bp, Artificial sequence
  hybrid sequence
  CDS (1)..(2427)
atgaagtcgatcctagatggccttgcagataccaccttccgcaccatcaccactgacctcctgtacgtgggctcaaatgacattcagtacgaagacatcaaaggtgacatggcatccaaattagggtacttcccacagaaattccctttaacttcctttaggggaagtcccttccaagagaagatgactgcgggagacaacccccagctagtcccagcagaccaggtgaacattacagaattttacaacaagtctctctcgtccttcaaggagaatgaggagaacatccagtgtggggagaacttcatggacatagagtgtttcatggtcctgaaccccagccagcagctggccattgcagtcctgtccctcacgctgggcaccttcacggtcctggagaacctcctggtgctgtgcgtcatcctccactcccgcagcctccgctgcaggccttcctaccacttcatcggcagcctggcggtggcagacctcctggggagtgtcatttttgtctacagcttcattgacttccacgtgttccaccgcaaagatagccgcaacgtgtttctgttcaaactgggtggggtcacggcctccttcactgcctccgtgggcagcctgttcctcacagccatcgacaggtacatatccattcacaggcccctggcctataagaggattgtcaccaggcccaaggccgtggtggcgttttgcctgatgtggaccatagccattgtgatcgccgtgctgcctctcctgggctggaactgcgagaaactgcaatctgtttgctcagacattttcccacacattgatgaaacctacctgatgttctggatcggggtcaccagcgtactgcttctgttcatcgtgtatgcgtacatgtatattctctggaaggctcacagccacgccgtccgcatgattcagcgtggcacccagaagagcatcatcatccacacgtctgaggatgggaaggtacaggtgacccggccagaccaagcccgcatggacattaggttagccaagaccctggtcctgatcctggtggtgttgatcatctgctggggccctctgcttgcaatcatggtgtatgatgtctttgggaagatgaacaagctcattaagacggtgtttgcattctgcagtatgctctgcctgctgaactccaccgtgaaccccatcatctatgctctgaggagtaaggacctgcgacacgctttccggagcatgtttccctcttgtgaaggcactgcgcagcctctggataactaccgtactcgagagaggagggcccgcttcgtgtccaagaaaggcaactgcaacgtcgcccacaagaacattcgagagcagggccgcttcctgcaggatgtgttcaccacgctggtggacctcaaatggccacacactctgctcattttcaccatgtccttcctgtgcagctggctgctctttgccatggtctggtggctcatcgccttcgcccacggtgatctctatgcttacatggagaaaggcatcacggacctggccccctacccatacgatgtaccagattacgccggagagggcaccaatgtgccctgcgtcacaagcatccactccttttcatctgccttccttttctccatcgaggtccaggtgaccattggtttcggcgggcgcatggtgacagaggaatgtcccctggccatcctcattctcattgtgcagaatatcgtcgggctgatgatcaacgccatcatgctgggctgcatcttcatgaaaacggcccaggcacatcggcgggcagaaaccctcatcttcagcaagcatgctgtgatcaccctgcgccatggccgcctgtgcttcatgctgcgcgtaggggacctccgaaagagcatgatcattagcgccaccatccacatgcaggtggtgcgcaagaccaccagccccgagggcgaagttgtgcctctccaccaggtagacatccccatggagaatggcgtgggtggtaacggcatcttcctggtggccccactcatcatctaccacgtcatcgactccaacagcccgctctacgacctggctcctagtgacctgcaccaccaccaggacctggagatcattgtcatcttggaaggcgtggtagaaaccacgggcatcaccacccaggcccgcacctcctacctagctgacgagattctatgggggcagcgctttgtccccattgtggccgaggaggacggccgctattctgtggactactccaaatttggtaacaccattaaagtgcccacaccactctgcacagcccgccagcttgatgaggaccgcagtctgctggatgccctgaccctcgcctcgtcgcgggggcccctgcgcaagcgcagtgtggctgtggcgaaggccaagcccaagtttagcatctctccagattccttgtcc

SEQ ID NO: 202 - protein, 809 aa, Artificial sequence
  Synthetic Construct
MKSILDGLADTTFRTITTDLLYVGSNDIQYEDIKGDMASKLGYFPQKFPLTSFRGSPFQEKMTAGDNPQLVPADQVNITEFYNKSLSSFKENEENIQCGENFMDIECFMVLNPSQQLAIAVLSLTLGTFTVLENLLVLCVILHSRSLRCRPSYHFIGSLAVADLLGSVIFVYSFIDFHVFHRKDSRNVFLFKLGGVTASFTASVGSLFLTAIDRYISIHRPLAYKRIVTRPKAVVAFCLMWTIAIVIAVLPLLGWNCEKLQSVCSDIFPHIDETYLMFWIGVTSVLLLFIVYAYMYILWKAHSHAVRMIQRGTQKSIIIHTSEDGKVQVTRPDQARMDIRLAKTLVLILVVLIICWGPLLAIMVYDVFGKMNKLIKTVFAFCSMLCLLNSTVNPIIYALRSKDLRHAFRSMFPSCEGTAQPLDNYRTRERRARFVSKKGNCNVAHKNIREQGRFLQDVFTTLVDLKWPHTLLIFTMSFLCSWLLFAMVWWLIAFAHGDLYAYMEKGITDLAPYPYDVPDYAGEGTNVPCVTSIHSFSSAFLFSIEVQVTIGFGGRMVTEECPLAILILIVQNIVGLMINAIMLGCIFMKTAQAHRRAETLIFSKHAVITLRHGRLCFMLRVGDLRKSMIISATIHMQVVRKTTSPEGEVVPLHQVDIPMENGVGGNGIFLVAPLIIYHVIDSNSPLYDLAPSDLHHHQDLEIIVILEGVVETTGITTQARTSYLADEILWGQRFVPIVAEEDGRYSVDYSKFGNTIKVPTPLCTARQLDEDRSLLDALTLASSRGPLRKRSVAVAKAKPKFSISPDSLS

SEQ ID NO: 203 - DNA, 2355 bp, Artificial sequence
  hybrid sequence
  CDS (1)..(2355)
atggcatctctgagtcagctgagtagccacctgaactacacctgtggggcagagaactccacaggtgccagccaggcccgcccacatgcctactatgccctctcctactgcgcgctcatcctggccatcgtcttcggcaatggcctggtgtgcatggctgtgctgaaggagcgggccctgcagactaccaccaactacttagtagtgagcctggctgtggcagacttgctggtggccaccttggtgatgccctgggtggtatacctggaggtgacaggtggagtctggaatttcagccgcatttgctgtgatgtttttgtcaccctggatgtcatgatgtgtacagccagcatccttaatctctgtgccatcagcatagacaggtacactgcagtggtcatgcccgttcactaccagcatggcacgggacagagctcctgtcggcgcgtggccctcatgatcacggccgtctgggtactggcctttgctgtgtcctgccctcttctgtttggctttaataccacaggggaccccactgtctgctccatctccaaccctgattttgtcatctactcttcagtggtgtccttctacctgccctttggagtgactgtccttgtctatgccagaatctatgtggtgctgaaacaaaggagacggaaaaggatcctcactcgacagaacagtcagtgcaacagtgtcaggcctggcttcccccaacaaaccctctctcctgacccggcacatctggagctgaagcgttactacagcatctgccaggacactgccttgggtggaccaggcttccaagaaagaggaggagagttaaaaagagaggagaagactcggaattccctgagtcccaccatagcgcctaagctcagcttagaagttcgaaagctcagcaatggcagattatcgacatctttgaagctggggcccctgcaacctcggggagtgccacttcgggagaagaaggcaacccaaatggtggccattgtgcttggggccttcattgtctgctggctgcccttcttcttgacccatgttctcaatacccactgccagacatgccacgtgtccccagagctttacagtgccacgacatggctgggctacgtgaatagcgccctcaaccctgtgatctataccaccttcaatatcgagttccggaaagccttcctcaagatcctgtcttgctaccgtactcgagagaggagggcccgcttcgtgtccaagaaaggcaactgcaacgtcgcccacaagaacattcgagagcagggccgcttcctgcaggatgtgttcaccacgctggtggacctcaaatggccacacactctgctcattttcaccatgtccttcctgtgcagctggctgctctttgccatggtctggtggctcatcgccttcgcccacggtgatctctatgcttacatggagaaaggcatcacggacctggccccctacccatacgatgtaccagattacgccggagagggcaccaatgtgccctgcgtcacaagcatccactccttttcatctgccttccttttctccatcgaggtccaggtgaccattggtttcggcgggcgcatggtgacagaggaatgtcccctggccatcctcattctcattgtgcagaatatcgtcgggctgatgatcaacgccatcatgctgggctgcatcttcatgaaaacggcccaggcacatcggcgggcagaaaccctcatcttcagcaagcatgctgtgatcaccctgcgccatggccgcctgtgcttcatgctgcgcgtaggggacctccgaaagagcatgatcattagcgccaccatccacatgcaggtggtgcgcaagaccaccagccccgagggcgaagttgtgcctctccaccaggtagacatccccatggagaatggcgtgggtggtaacggcatcttcctggtggccccactcatcatctaccacgtcatcgactccaacagcccgctctacgacctggctcctagtgacctgcaccaccaccaggacctggagatcattgtcatcttggaaggcgtggtagaaaccacgggcatcaccacccaggcccgcacctcctacctagctgacgagattctatgggggcagcgctttgtccccattgtggccgaggaggacggccgctattctgtggactactccaaatttggtaacaccattaaagtgcccacaccactctgcacagcccgccagcttgatgaggaccgcagtctgctggatgccctgaccctcgcctcgtcgcgggggcccctgcgcaagcgcagtgtggctgtggcgaaggccaagcccaagtttagcatctctccagattccttgtcc

SEQ ID NO: 204 - protein, 785 aa, Artificial sequence [sequence omitted]

SEQ ID NO: 205 - DNA, 2235 bp, Artificial sequence
  hybrid sequence
  CDS (1)..(2235)
atgctgtccacatctcgttctcggtttatcagaaataccaacgagagcggtgaagaagtcaccaccttttttgattatgattacggtgctccctgtcataaatttgacgtgaagcaaattggggcccaactcctgcctccgctctactcgctggtgttcatctttggttttgtgggcaacatgctggtcgtcctcatcttaataaactgcaaaaagctgaagtgcttgactgacatttacctgctcaacctggccatctctgatctgctttttcttattactctcccattgtgggctcactctgctgcaaatgagtgggtctttgggaatgcaatgtgcaaattattcacagggctgtatcacatcggttattttggcggaatcttcttcatcatcctcctgacaatcgatagatacctggctattgtccatgctgtgtttgctttaaaagccaggacggtcacctttggggtggtgacaagtgtgatcacctggttggtggctgtgtttgcttctgtcccaggaatcatctttactaaatgccagaaagaagattctgtttatgtctgtggcccttattttccacgaggatggaataatttccacacaataatgaggaacattttggggctggtcctgccgctgctcatcatggtcatctgctactcgggaatcctgaaaaccctgcttcggtgtcgaaacgagaagaagaggcatagggcagtgagagtcatcttcaccatcatgattgtttactttctcttctggactccctataacattgtcattctcctgaacaccttccaggaattcttcggcctgagtaactgtgaaagcaccagtcaactggaccaagccacgcaggtgacagagactcttgggatgactcactgctgcatcaatcccatcatctatgccttcgttggggagaagttcagaaggtatctctcggtgttcttccgaaagcacatcaccaagcgcttctgcaaacaatgtccagttttctacagggagacagtggatggagtgacttcaacaaacacgccttccactggggagcaggaagtctcggctggtttataccgtactcgagagaggagggcccgcttcgtgtccaagaaaggcaactgcaacgtcgcccacaagaacattcgagagcagggccgcttcctgcaggatgtgttcaccacgctggtggacctcaaatggccacacactctgctcattttcaccatgtccttcctgtgcagctggctgctctttgccatggtctggtggctcatcgccttcgcccacggtgatctctatgcttacatggagaaaggcatcacggacctggccccctacccatacgatgtaccagattacgccggagagggcaccaatgtgccctgcgtcacaagcatccactccttttcatctgccttccttttctccatcgaggtccaggtgaccattggtttcggcgggcgcatggtgacagaggaatgtcccctggccatcctcattctcattgtgcagaatatcgtcgggctgatgatcaacgccatcatgctgggctgcatcttcatgaaaacggcccaggcacatcggcgggcagaaaccctcatcttcagcaagcatgctgtgatcaccctgcgccatggccgcctgtgcttcatgctgcgcgtaggggacctccgaaagagcatgatcattagcgccaccatccacatgcaggtggtgcgcaagaccaccagccccgagggcgaagttgtgcctctccaccaggtagacatccccatggagaatggcgtgggtggtaacggcatcttcctggtggccccactcatcatctaccacgtcatcgactccaacagcccgctctacgacctggctcctagtgacctgcaccaccaccaggacctggagatcattgtcatcttggaaggcgtggtagaaaccacgggcatcaccacccaggcccgcacctcctacctagctgacgagattctatgggggcagcgctttgtccccattgtggccgaggaggacggccgctattctgtggactactccaaatttggtaacaccattaaagtgcccacaccactctgcacagcccgccagcttgatgaggaccgcagtctgctggatgccctgaccctcgcctcgtcgcgggggcccctgcgcaagcgcagtgtggctgtggcgaaggccaagcccaagtttagcatctctccagattccttgtcc

SEQ ID NO: 206 - protein, 745 aa, Artificial sequence [sequence omitted]

SEQ ID NO: 207 - protein, 391 aa, Homo sapiens
MNASSRNVFDTLIRVLTESMFKHLRKWVVTRFFGHSRQRARLVSKDGRCNIEFGNVEAQSRFIFFVDIWTTVLDLKWRYKMTIFITAFLGSWFFFGLLWYAVAYIHKDLPEFHPSANHTPCVENINGLTSAFLFSLETQVTIGYGFRCVTEQCATAIFLLIFQSILGVIINSFMCGAILAKISRPKKRAKTITFSKNAVISKRGGKLCLLIRVANLRKSLLIGSHIYGKLLKTTVTPEGETIILDQININFVVDAGNENLFFISPLTIYHVIDHNSPFFHMAAETLLQQDFELVVFLDGTVESTSATCQVRTSYVPEEVLWGYRFAPIVSKTKEGKYRVDFHNFSKTVEVETPHCAMCLYNEKDVRARMKRGYDNPNFILSEVNETDDTKM

SEQ ID NO: 208 - protein, 427 aa, Homo sapiens
MGSVRTNRYSIVSSEEDGMKLATMAVANGFGNGKSKVHTRQQCRSRFVKKDGHCNVQFINVGEKGQRYLADIFTTCVDIRWRWMLVIFCLAFVLSWLFFGCVFWLIALLHGDLDASKEGKACVSEVNSFTAAFLFSIETQTTIGYGFRCVTDECPIAVFMVVFQSIVGCIIDAFIIGAVMAKMAKPKKRNETLVFSHNAVIAMRDGKLCLMWRVGNLRKSHLVEAHVRAQLLKSRITSEGEYIPLDQIDINVGFDSGIDRIFLVSPITIVHEIDEDSPLYDLSKQDIDNADFEIVVILEGMVEATAMTTQCRSSYLANEILWGHRYEPVLFEEKHYYKVDYSRFHKTYEVPNTPLCSARDLAEKKYILSNANSFCYENEVALTSKEEDDSENGVPESTSTDTPPDIDLHNQASVPLEPRPLRRESEI

SEQ ID NO: 209 - protein, 433 aa, Homo sapiens
MTAASRANPYSIVSSEEDGLHLVTMSGANGFGNGKVHTRRRCRNRFVKKNGQCNIEFANMDEKSQRYLADMFTTCVDIRWRYMLLIFSLAFLASWLLFGIIFWVIAVAHGDLEPAEGRGRTPCVMQVHGFMAAFLFSIETQTTIGYGLRCVTEECPVAVFMVVAQSIVGCIIDSFMIGAIMAKMARPKKRAQTLLFSHNAVVALRDGKLCLMWRVGNLRKSHIVEAHVRAQLIKPRVTEEGEYIPLDQIDIDVGFDKGLDRIFLVSPITILHEIDEASPLFGISRQDLETDDFEIVVILEGMVEATAMTTQARSSYLANEILWGHRFEPVLFEEKNQYKIDYSHFHKTYEVPSTPRCSAKDLVENKFLLPSANSFCYENELAFLSRDEEDEADGDQDGRSRDGLSPQARHDFDRLQAGGGVLEQRPYRRESEI

SEQ ID NO: 210 - protein, 445 aa, Homo sapiens
MHGHSRNGQAHVPRRKRRNRFVKKNGQCNVYFANLSNKSQRYMADIFTTCVDTRWRYMLMIFSAAFLVSWLFFGLLFWCIAFFHGDLEASPGVPAAGGPAAGGGGAAPVAPKPCIMHVNGFLGAFLFSVETQTTIGYGFRCVTEECPLAVIAVVVQSIVGCVIDSFMIGTIMAKMARPKKRAQTLLFSHHAVISVRDGKLCLMWRVGNLRKSHIVEAHVRAQLIKPYMTQEGEYLPLDQRDLNVGYDIGLDRIFLVSPIIIVHEIDEDSPLYGMGKEELESEDFEIVVILEGMVEATAMTTQARSSYLASEILWGHRFEPVVFEEKSHYKVDYSRFHKTYEVAGTPCCSARELQESKITVLPAPPPPPSAFCYENELALMSQEEEEMEEEAAAAAAVAAGLGLEAGSKEEAGIIRMLEFGSHLDLERMQASLPLDNISYRRESAI

SEQ ID NO: 211 - protein, 436 aa, Homo sapiens
MGLARALRRLSGALDSGDSRAGDEEEAGPGLCRNGWAPAPVQSPVGRRRGRFVKKDGHCNVRFVNLGGQGARYLSDLFTTCVDVRWRWMCLLFSCSFLASWLLFGLAFWLIASLHGDLAAPPPPAPCFSHVASFLAAFLFALETQTSIGYGVRSVTEECPAAVAAVVLQCIAGCVLDAFVVGAVMAKMAKPKKRNETLVFSENAVVALRDHRLCLMWRVGNLRRSHLVEAHVRAQLLQPRVTPEGEYIPLDHQDVDVGFDGGTDRIFLVSPITIVHEIDSASPLYELGRAELARADFELVVILEGMVEATAMTTQCRSSYLPGELLWGHRFEPVLFQRGSQYEVDYRHFHRTYEVPGTPVCSAKELDERAEQASHSLKSSFPGSLTAFCYENELALSCCQEEDEDDETEEGNGVETEDGAASPRVLTPTLALTLPP

SEQ ID NO: 212 - protein, 501 aa, Homo sapiens
MSALRRKFGDDYQVVTTSSSGSGLQPQGPGQDPQQQLVPKKKRQRFVDKNGRCNVQHGNLGSETSRYLSDLFTTLVDLKWRWNLFIFILTYTVAWLFMASMWWVIAYTRGDLNKAHVGNYTPCVANVYNFPSAFLFFIETEATIGYGYRYITDKCPEGIILFLFQSILGSIVDAFLIGCMFIKMSQPKKRAETLMFSEHAVISMRDGKLTLMFRVGNLRNSHMVSAQIRCKLLKSRQTPEGEFLPLDQLELDVGFSTGADQLFLVSPLTICHVIDAKSPFYDLSQRSMQTEQFEIVVILEGIVETTGMTCQARTSYTEDEVLWGHRFFPVISLEEGFFKVDYSQFHATFEVPTPPYSVKEQEEMLLMSSPLIAPAITNSKERHNSVECLDGLDDITTKLPSKLQKITGREDFPKKLLRMSSTTSEKAYSLGDLPMKLQRISSVPGNSEEKLVSKTTKMLSDPMSQSVADLPPKLQKMAGGAARMEGNLPAKLRKMNSDRFT

SEQ ID NO: 213 - protein, 423 aa, Homo sapiens
MAKLTESMTNVLEGDSMDQDVESPVAIHQPKLPKQARDDLPRHISRDRTKRKIQRYVRKDGKCNVHHGNVRETYRYLTDIFTTLVDLKWRFNLLIFVMVYTVTWLFFGMIWWLIAYIRGDMDHIEDPSWTPCVTNLNGFVSAFLFSIETETTIGYGYRVITDKCPEGIILLLIQSVLGSIVNAFMVGCMFVKISQPKKRAETLVFSTHAVISMRDGKLCLMFRVGDLRNSHIVEASIRAKLIKSKQTSEGEFIPLNQTDINVGYYTGDDRLFLVSPLIISHEINQQSPFWEISKAQLPKEELEIVVILEGMVEATGMTCQARSSYITSEILWGYRFTPVLTLEDGFYEVDYNSFHETYETSTPSLSAKELAELASRAELPLSWSVSSKLNQHAELETEEEEKNLEEQTERNGDVANLENESKV

SEQ ID NO: 214 - protein, 393 aa, Homo sapiens
MAQENAAFSPGQEEPPRRRGRQRYVEKDGRCNVQQGNVRETYRYLTDLFTTLVDLQWRLSLLFFVLAYALTWLFFGAIWWLIAYGRGDLEHLEDTAWTPCVNNLNGFVAAFLFSIETETTIGYGHRVITDQCPEGIVLLLLQAILGSMVNAFMVGCMFVKISQPNKRAATLVFSSHAVVSLRDGRLCLMFRVGDLRSSHIVEASIRAKLIRSRQTLEGEFIPLHQTDLSVGFDTGDDRLFLVSPLVISHEIDAASPFWEASRRALERDDFEIVVILEGMVEATGMTCQARSSYLVDEVLWGHRFTSVLTLEDGFYEVDYASFHETFEVPTPSCSARELAEAAARLDAHLYWSIPSRLDEKVEEEGAGEGAGGEAGADKEQNGCLPPPESESKV

SEQ ID NO: 215 - protein, 419 aa, Homo sapiens
MAGDSRNAMNQDMEIGVTPWDPKKIPKQARDYVPIATDRTRLLAEGKKPRQRYMEKSGKCNVHHGNVQETYRYLSDLFTTLVDLKWRFNLLVFTMVYTVTWLFFGFIWWLIAYIRGDLDHVGDQEWIPCVENLSGFVSAFLFSIETETTIGYGFRVITEKCPEGIILLLVQAILGSIVNAFMVGCMFVKISQPKKRAETLMFSNNAVISMRDEKLCLMFRVGDLRNSHIVEASIRAKLIKSRQTKEGEFIPLNQTDINVGFDTGDDRLFLVSPLIISHEINEKSPFWEMSQAQLHQEEFEVVVILEGMVEATGMTCQARSSYMDTEVLWGHRFTPVLTLEKGFYEVDYNTFHDTYETNTPSCCAKELAEMKREGRLLQYLPSPPLLGGCAEAGLDAEAEQNEEDEPKGLGGSREARGSV

SEQ ID NO: 216 - protein, 379 aa, Homo sapiens
MTSVAKVYYSQTTQTESRPLMGPGIRRRRVLTKDGRSNVRMEHIADKRFLYLKDLWTTFIDMQWRYKLLLFSATFAGTWFLFGVVWYLVAVAHGDLLELDPPANHTPCVVQVHTLTGAFLFSLESQTTIGYGFRYISEECPLAIVLLIAQLVLTTILEIFITGTFLAKIARPKKRAETIRFSQHAVVASHNGKPCLMIRVANMRKSLLIGCQVTGKLLQTHQTKEGENIRLNQVNVTFQVDTASDSPFLILPLTFYHVVDETSPLKDLPLRSGEGDFELVLILSGTVESTSATCQVRTSYLPEEILWGYEFTPAISLSASGKYIADFSLFDQVVKVASPSGLRDSTVRYGDPEKLKLEESLREQAEKEGSALSVRISNV

SEQ ID NO: 217 - protein, 375 aa, Homo sapiens
MDAIHIGMSSTPLVKHTAGAGLKANRPRVMSKSGHSNVRIDKVDGIYLLYLQDLWTTVIDMKWRYKLTLFAATFVMTWFLFGVIYYAIAFIHGDLEPGEPISNHTPCIMKVDSLTGAFLFSLESQTTIGYGVRSITEECPHAIFLLVAQLVITTLIEIFITGTFLAKIARPKKRAETIKFSHCAVITKQNGKLCLVIQVANMRKSLLIQCQLSGKLLQTHVTKEGERILLNQATVKFHVDSSSESPFLILPMTFYHVLDETSPLRDLTPQNLKEKEFELVVLLNATVESTSAVCQSRTSYIPEEIYWGFEFVPVVSLSKNGKYVADFSQFEQIRKSPDCTFYCADSEKQQLEEKYRQEDQRERELRTLLLQQSNV

SEQ ID NO: 218 - protein, 418 aa, Homo sapiens
MSYYGSSYHIINADAKYPGYPPEHIIAEKRRARRRLLHKDGSCNVYFKHIFGEWGSYVVDIFTTLVDTKWRHMFVIFSLSYILSWLIFGSVFWLIAFHHGDLLNDPDITPCVDNVHSFTGAFLFSLETQTTIGYGYRCVTEECSVAVLMVILQSILSCIINTFIIGAALAKMATARKRAQTIRFSYFALIGMRDGKLCLMWRIGDFRPNHVVEGTVRAQLLRYTEDSEGRMTMAFKDLKLVNDQIILVTPVTIVHEIDHESPLYALDRKAVAKDNFEILVTFIYTGDSTGTSHQSRSSYVPREILWGHRFNDVLEVKRKYYKVNCLQFEGSVEVYAPFCSAKQLDWKDQQLHIEKAPPVRESCTSDTKARRRSFSAVAIVSSCENPEETTTSATHEYRETPYQKALLTLNRISVESQM

SEQ ID NO: 219 - protein, 424 aa, Homo sapiens
MLARKSIIPEEYVLARIAAENLRKPRIRDRLPKARFIAKSGACNLAHKNIREQGRFLQDIFTTLVDLKWRHTLVIFTMSFLCSWLLFAIMWWLVAFAHGDIYAYMEKSGMEKSGLESTVCVTNVRSFTSAFLFSIEVQVTIGFGGRMMTEECPLAITVLILQNIVGLIINAVMLGCIFMKTAQAHRRAETLIFSRHAVIAVRNGKLCFMFRVGDLRKSMIISASVRIQVVKKTTTPEGEVVPIHQLDIPVDNPIESNNIFLVAPLIICHVIDKRSPLYDISATDLANQDLEVIVILEGVVETTGITTQARTSYIAEEIQWGHRFVSIVTEEEGVYSVDYSKFGNTVKVAAPRCSARELDEKPSILIQTLQKSELSHQNSLRKRNSMRRNNSMRRNNSIRRNNSSLMVPKVQFMTPEGNQNTSES

SEQ ID NO: 220 - protein, 360 aa, Homo sapiens
MDSSNCKVIAPLLSQRYRRMVTKDGHSTLQMDGAQRGLAYLRDAWGILMDMRWRWMMLVFSASFVVHWLVFAVLWYVLAEMNGDLELDHDAPPENHTICVKYITSFTAAFSFSLETQLTIGYGTMFPSGDCPSAIALLAIQMLLGLMLEAFITGAFVAKIARPKNRAFSIRFTDTAVVAHMDGKPNLIFQVANTRPSPLTSVRVSAVLYQERENGKLYQTSVDFHLDGISSDECPFFIFPLTYYHSITPSSPLATLLQHENPSHFELVVFLSAMQEGTGEICQRRTSYLPSEIMLHHCFASLLTRGSKGEYQIKMENFDKTVPEFPTPLVSKSPNRTDLDIHINGQSIDNFQISETGLTE

SEQ ID NO: 221 - protein, 495 aa, Homo sapiens
MTVMSGENVDEASAAPGHPQDGSYPRQADHDDHECCERVVINISGLRFETQLKTLAQFPNTLLGNPKKRMRYFDPLRNEYFFDRNRPSFDAILYYYQSGGRLRRPVNVPLDMFSEEIKFYELGEEAMEKFREDEGFIKEEERPLPEKEYQRQVWLLFEYPESSGPARVIAIVSVMVILISIVIFCLETLPELKDDKDFTGTVHRIDNTTVIYNSNIFTDPFFIVETLCIIWFSFELVVRFFACPSKTDFFKNIMNFIDIVAIIPYFITLGTEIAEQEGNQKGEQATSLAILRVIRLVRVFRIFKLSRHSKGLQILGQTLKASMRELGLLIFFLFIGVILFSSAVYFAEAEEAESHFSSIPDAFWWAVVSMTTVGYGDMYPVTIGGKIVGSLCAIAGVLTIALPVPVIVSNFNYFYHRETEGEEQAQLLHVSSPNLASDSDLSRRSSSTMSKSEYMEIEEDMNNSIAHYRQVNIRTANCTTANQNCVNKSKLLTDV

SEQ ID NO: 222 - protein, 499 aa, Homo sapiens
MTVATGDPADEAAALPGHPQDTYDPEADHECCERVVINISGLRFETQLKTLAQFPETLLGDPKKRMRYFDPLRNEYFFDRNRPSFDAILYYYQSGGRLRRPVNVPLDIFSEEIRFYELGEEAMEMFREDEGYIKEEERPLPENEFQRQVWLLFEYPESSGPARIIAIVSVMVILISIVSFCLETLPIFRDENEDMHGSGVTFHTYSNSTIGYQQSTSFTDPFFIVETLCIIWFSFEFLVRFFACPSKAGFFTNIMNIIDIVAIIPYFITLGTELAEKPEDAQQGQQAMSLAILRVIRLVRVFRIFKLSRHSKGLQILGQTLKASMRELGLLIFFLFIGVILFSSAVYFAEADERESQFPSIPDAFWWAVVSMTTVGYGDMVPTTIGGKIVGSLCAIAGVLTIALPVPVIVSNFNYFYHRETEGEEQAQYLQVTSCPKIPSSPDLKKSRSASTISKSDYMEIQEGVNNSNEDFREENLKTANCTLANTNYVNITKMLTDV

SEQ ID NO: 223 - protein, 575 aa, Homo sapiens
MDERLSLLRSPPPPSARHRAHPPQRPASSGGAHTLVNHGYAEPAAGRELPPDMTVVPGDHLLEPEVADGGGAPPQGGCGGGGCDRYEPLPPSLPAAGEQDCCGERVVINISGLRFETQLKTLCQFPETLLGDPKRRMRYFDPLRNEYFFDRNRPSFDAILYYYQSGGRIRRPVNVPIDIFSEEIRFYQLGEEAMEKFREDEGFLREEERPLPRRDFQRQVWLLFEYPESSGPARGIAIVSVLVILISIVIFCLETLPEFRDEKDYPASTSQDSFEAAGNSTSGSRAGASSFSDPFFVVETLCIIWFSFELLVRFFACPSKATFSRNIMNLIDIVAIIPYFITLGTELAERQGNGQQAMSLAILRVIRLVRVFRIFKLSRHSKGLQILGQTLKASMRELGLLIFFLFIGVILFSSAVYFAEADDPTSGFSSIPDAFWWAVVTMTTVGYGDMHPVTIGGKIVGSLCAIAGVLTIALPVPVIVSNFNYFYHRETEGEEQSQYMHVGSCQHLSSSAEELRKARSNSTLSKSEYMVIEEGGMNHSAFPQTPFKTGNSTATCTTNNNPNSCVNIKKIFTDV

SEQ ID NO: 224 - protein, 653 aa, Homo sapiens [sequence omitted]

SEQ ID NO: 225 - protein, 613 aa, Homo sapiens
MEIALVPLENGGAMTVRGGDEARAGCGQATGGELQCPPTAGLSDGPKEPAPKGRGAQRDADSGVRPLPPLPDPGVRPLPPLPEELPRPRRPPPEDEEEEGDPGLGTVEDQALGTASLHHQRVHINISGLRFETQLGTLAQFPNTLLGDPAKRLRYFDPLRNEYFFDRNRPSFDGILYYYQSGGRLRRPVNVSLDVFADEIRFYQLGDEAMERFREDEGFIKEEEKPLPRNEFQRQVWLIFEYPESSGSARAIAIVSVLVILISIITFCLETLPEFRDERELLRHPPAPHQPPAPAPGANGSGVMAPPSGPTVAPLLPRTLADPFFIVETTCVIWFTFELLVRFFACPSKAGFSRNIMNIIDVVAIFPYFITLGTELAEQQPGGGGGGQNGQQAMSLAILRVIRLVRVFRIFKLSRHSKGLQILGKTLQASMRELGLLIFFLFIGVILFSSAVYFAEADNQGTHFSSIPDAFWWAVVTMTTVGYGDMRPITVGGKIVGSLCAIAGVLTIALPVPVIVSNFNYFYHRETDHEEPAVLKEEQGTQSQGPGLDRGVQRKVSGSRGSFCKAGGTLENADSARRGSCPLEKCNVKAKSNVDLRRSLYALCLDTSRETDL

SEQ ID NO: 226 - protein, 529 aa, Homo sapiens
MRSEKSLTLAAPGEVRGPEGEQQDAGDFPEAGGGGGCCSSERLVINISGLRFETQLRTLSLFPDTLLGDPGRRVRFFDPLRNEYFFDRNRPSFDAILYYYQSGGRLRRPVNVPLDIFLEEIRFYQLGDEALAAFREDEGCLPEGGEDEKPLPSQPFQRQVWLLFEYPESSGPARGIAIVSVLVILISIVIFCLETLPQFRVDGRGGNNGGVSRVSPVSRGSQEEEEDEDDSYTFHHGITPGEMGTGGSSSLSTLGGSFFTDPFFLVETLCIVWFTFELLVRFSACPSKPAFFRNIMNIIDLVAIFPYFITLGTELVQQQEQQPASGGGGQNGQQAMSLAILRVIRLVRVFRIFKLSRHSKGLQILGKTLQASMRELGLLIFFLFIGVILFSSAVYFAEADDDDSLFPSIPDAFWWAVVTMTTVGYGDMYPMTVGGKIVGSLCAIAGVLTIALPVPVIVSNFNYFYHRETEQEEQGQYTHVTCGQPAPDLRATDNGLGKPDFPEANRERRPSYLPTPHRAYAEKRMLTEV

SEQ ID NO: 227 - protein, 616 aa, Homo sapiens
MAAVAGLYGLGEDRQHRKKQQQQQQHQKEQLEQKEEQKKIAERKLQLREQQLQRNSLDGYGSLPKLSSQDEEGGAGHGFGGGPQHFEPIPHDHDFCERVVINVSGLRFETQLRTLNQFPDTLLGDPARRLRYFDPLRNEYFFDRSRPSFDAILYYYQSGGRLRRPVNVPLDVFSEEIKFYELGDQAINKFREDEGFIKEEERPLPDNEKQRKVWLLFEYPESSQAARVVAIISVFVILLSIVIFCLETLPEFKHYKVFNTTTNGTKIEEDEVPDITDPFFLIETLCIIWFTFELTVRFLACPNKLNFCRDVMNVIDIIAIIPYFITLATVVAEEEDTLNLPKAPVSPQDKSSNQAMSLAILRVIRLVRVFRIFKLSRHSKGLQILGRTLKASMRELGLLIFFLFIGVVLFSSAVYFAEAGSENSFFKSIPDAFWWAVVTMTTVGYGDMTPVGFWGKIVGSLCVVAGVLTIALPVPVIVSNFNYFYHREADREEMQSQNFNHVTSCSYLPGALGQHLKKSSLSESSSDIMDLDDGIDATTPGLTDHTGRHMVPFLRTQQSFEKQQLQLQLQLQQQSQSPHGQQMTQQQQLGQNGLRSTNSLQLRHNNAMAVSIETDV

SEQ ID NO: 228 - protein, 619 aa, Homo sapiens
MTYIPKKMQHYAHAAMNLINMDSENRVVLNVGGIRHETYKATLKKIPATRLSRLTEALANYDPILNEYFFDRHPGVFAQVLNYYRTGKLHYPTDVCGPLFEEELEFWGLDSNQVEPCCWMTYTQHRDTQETLAVLDRLDLDTEKPSEEELARKFGFEEDYYKGTISWWQEMKPRIWSLFDEPYSSNAAKTIGVVSVFFICISILSFCLKTHPDMRVPIVRNITVKTANGSNGWFLDKTQTNAHIAFFYIECVCNAWFTFEILVRFISSPNKWEFIKSSVNIIDYIATLSFYIDLVLQRFASHLENADILEFFSIIRIMRLFKLTRHSSGLKILIQTFRASAKELTLLVFFLVLGIVIFASLVYYAERIQPNPHNDFNSIPLGLWWALVTMTTVGYGDMAPKTYIGMFVGALCALAGVLTIALPVPVIVSNFAMYYSHTQARAKLPKKRRRVLPVEQPRQPRLPGAPGGVSGCGTPGSGPHSGPMGSGGTGPRRMNNKTKDLVSPKSVAQLFAGPLGASIVAMSPRTMLDLNPALAMGKPTFQPRIPTPLAATPPPPVSSAGGMTASGIGTTSATGATSAPQPATPLPSIAVSTTASVGKDLGISTTTTTAQETSKKAFL

SEQ ID NO: 229 - protein, 400 aa, Homo sapiens
MASLSQLSSHLNYTCGAENSTGASQARPHAYYALSYCALILAIVFGNGLVCMAVLKERALQTTTNYLVVSLAVADLLVATLVMPWVVYLEVTGGVWNFSRICCDVFVTLDVMMCTASILNLCAISIDRYTAVVMPVHYQHGTGQSSCRRVALMITAVWVLAFAVSCPLLFGFNTTGDPTVCSISNPDFVIYSSVVSFYLPFGVTVLVYARIYVVLKQRRRKRILTRQNSQCNSVRPGFPQQTLSPDPAHLELKRYYSICQDTALGGPGFQERGGELKREEKTRNSLSPTIAPKLSLEVRKLSNGRLSTSLKLGPLQPRGVPLREKKATQMVAIVLGAFIVCWLPFFLTHVLNTHCQTCHVSPELYSATTWLGYVNSALNPVIYTTFNIEFRKAFLKILSC

SEQ ID NO: 230 - protein, 472 aa, Homo sapiens
MKSILDGLADTTFRTITTDLLYVGSNDIQYEDIKGDMASKLGYFPQKFPLTSFRGSPFQEKMTAGDNPQLVPADQVNITEFYNKSLSSFKENEENIQCGENFMDIECFMVLNPSQQLAIAVLSLTLGTFTVLENLLVLCVILHSRSLRCRPSYHFIGSLAVADLLGSVIFVYSFIDFHVFHRKDSRNVFLFKLGGVTASFTASVGSLFLTAIDRYISIHRPLAYKRIVTRPKAVVAFCLMWTIAIVIAVLPLLGWNCEKLQSVCSDIFPHIDETYLMFWIGVTSVLLLFIVYAYMYILWKAHSHAVRMIQRGTQKSIIIHTSEDGKVQVTRPDQARMDIRLAKTLVLILVVLIICWGPLLAIMVYDVFGKMNKLIKTVFAFCSMLCLLNSTVNPIIYALRSKDLRHAFRSMFPSCEGTAQPLDNSMGDSDCLHKHANNAASVHRAAESCIKSTVKIAKVTMSVSTDTSAEAL

SEQ ID NO: 231 - protein, 374 aa, Homo sapiens
MLSTSRSRFIRNTNESGEEVTTFFDYDYGAPCHKFDVKQIGAQLLPPLYSLVFIFGFVGNMLVVLILINCKKLKCLTDIYLLNLAISDLLFLITLPLWAHSAANEWVFGNAMCKLFTGLYHIGYFGGIFFIILLTIDRYLAIVHAVFALKARTVTFGVVTSVITWLVAVFASVPGIIFTKCQKEDSVYVCGPYFPRGWNNFHTIMRNILGLVLPLLIMVICYSGILKTLLRCRNEKKRHRAVRVIFTIMIVYFLFWTPYNIVILLNTFQEFFGLSNCESTSQLDQATQVTETLGMTHCCINPIIYAFVGEKFRSLFHIALGCRIAPLQKPVCGGPGVRPGKNVKVTTQGLLDGRGKGKSIGRAPEASLQDKEGA

SEQ ID NO: 232 - protein, 29 aa, Artificial Sequence
  derived from Kir6.2
WLIAFAHGDLAPGEGTNVPCVTSIHSFSS

SEQ ID NO: 233 - protein, 40 aa, Artificial Sequence
  derived from Kir6.2
WLIAFAHGDLYAYMEKGITDLAPGEGTNVPCVTSIHSFSS

SEQ ID NO: 234 - protein, 49 aa, Artificial Sequence
  derived from Kir6.2
WLIAFAHGDLYAYMEKGITDLAPYPYDVPDYAGEGTNVPCVTSIHSFSS

1-21. (canceled)

22. A hybrid protein comprising or consisting in
a. the sequence of a first membrane receptor, said first membrane receptor belonging to the G-protein coupled receptors (GPCR) class A family, covalently fused at its C-terminus to
b. the N-terminus sequence of an ion channel, said ion channel belonging to the potassium channel families selected from the inwardly rectifying potassium channels (Kir) family and the voltage-dependent potassium channels (Kᵥ) family,
said ion channel sequence being deleted of a number of amino acids ranging from 1 to the total number of amino acids of the region extending from the first amino acid at the N-terminus part of said ion channel to the first amino acid of the cytoplasmic α-helix that precedes the first of the two transmembrane α-helices that form the pore region of said potassium channel,
said ion channel possibly containing a tag sequence,
said first membrane receptor being liable to present in its cytoplasmic tail at least one mutation, said cytoplasmic tail being a sequence delimited by the first amino acid after the last amino acid of the transmembrane helix and the last amino acid of said first membrane receptor,
a deletion of a number of amino acids ranging from 1 to the total number of amino acids of the region delimited by the cytoplasmic tail, and/or
an addition, of an additional sequence of a number of amino acids ranging from 1 to the total number of amino acids of the region delimited by the cytoplasmic tail, originating from a second membrane receptor different from said first membrane receptor, preferably said additional sequence corresponding to the C-terminus of said second membrane receptor and/or
a substitution of a number of amino acids ranging from 1 to the total number of amino acids of the region delimited by the cytoplasmic tail, with an substitute sequence of a number of amino acids ranging from 1 to the total number of amino acids of the region delimited by the cytoplasmic tail from a second membrane receptor different from said first membrane receptor
said hybrid protein being such that said ion channel retains the property of electrical current generation of said ion channel in its natural configuration, and that said first membrane receptor retains the ability to interact with the ligand of said first membrane receptor in its natural configuration.

23. The hybrid protein comprising the sequence of a first membrane receptor fused at its C-terminus to the N-terminus of a ion channel according to claim 22, wherein said first membrane receptor
a. is present in said hybrid protein in its natural configuration, or
b. is deleted of a number of amino acids ranging from 1 to the total number of amino acids of the region extending from the first amino acid at the N-terminus part of said ion channel to the first amino acids of the first α-helix of the transmembrane domain of said ion channel, or
c. has an addition, of an additional sequence of a number of amino acids ranging from 1 to the total number of amino acids of the region delimited by the cytoplasmic tail, originating from a second membrane receptor different from said first membrane receptor, preferably said additional sequence corresponding to the C-terminus of said second membrane receptor, or
d. has, a substitution of a number of amino acids ranging from 1 to the total number of amino acids of the region delimited by the cytoplasmic tail, with an substitute sequence of a number of amino acids ranging from 1 to the total number of amino acids of the region delimited by the cytoplasmic tail from a second membrane receptor different from said first membrane receptor,
and a linker is possibly present between the C-terminus of said first membrane receptor and the N-terminus part of said ion channel, said linker being absent in the natural configuration of said first membrane receptor and said ion channel.

24. The hybrid protein according to claim 22, comprising a linker present between the C-terminus of said first membrane receptor and the N-terminus part of said ion channel, said linker being absent in the natural configuration of said first membrane receptor and said ion channel, in particular comprising or constituted by six contiguous glycine residues, represented by the following sequence: -G-G-G-G-G-G- (SEQ ID NO 196).

25. The hybrid protein according to claim 22, comprising a tag, in particular chosen among the group consisting in SEQ ID NO 2q, q varying from 79 to 97.

26. The hybrid protein according to claim 22, wherein said ion channel is chosen among:
a. the Kir potassium channels selected from the group comprising the potassium channels Kir1.1, Kir2.1, Kir2.2, Kir2.3, Kir2.4, Kir3.1, Kir3.2, Kir3.3, Kir3.4, Kir4.1, Kir4.2, Kir5.1, Kir6.1, Kir6.2 and Kir7.1, or
b. the Kv potassium channels selected from the group comprising the potassium channels Kv1.1, Kv1.2, Kv1.3, Kv1.4, Kv1.5, Kv1.6, Kv1.7, Kv1.8, Kv2.1, Kv2.2, Kv3.1, Kv3.2, Kv3.3, Kv3.4, Kv4.1, Kv4.2, Kv4.3, Kv5.1, Kv6.1, Kv6.2, Kv6.3, Kv6.4, Kv7.1, Kv7.2, Kv7.3, Kv7.4, Kv7.5, Kv8.1, Kv8.2, Kv9.1, Kv9.2, Kv9.3, Kv10.1, Kv10.2, Kv11.1, Kv11.2, Kv11.3, Kv12.1, Kv12. and Kv12.3.

27. The hybrid protein according to claim 22, wherein said first and second membrane receptor sequence is the sequence of a membrane receptor belonging to the family of GPCR class A receptor chosen among the group comprising:
muscarinic receptor, in particular the human muscarinic M2 receptor, in particular comprising or constituted by SEQ ID NO 10,
adrenergic receptor, in particular the human β2-adrenergic receptor, in particular comprising or constituted by SEQ ID NO 12,
dopaminergic receptor, in particular the human dopaminergic long D2 receptor, in particular comprising or constituted by SEQ ID NO 14,
dopaminergic receptor, in particular the human dopaminergic D3 receptor, in particular comprising or constituted by SEQ ID NO 229
serotonergic receptor, in particular the human 5HT1αreceptor, in particular comprising or constituted by SEQ ID NO 16,
canabinoïd receptor, in particular the human CB1 receptor, in particular comprising or constituted by SEQ ID NO 230
CXCR4 receptor, in particular the human CXCR4 receptor, in particular comprising or constituted by SEQ ID NO 18, and
CCR5 receptor, in particular the human CCR5 receptor, in particular comprising or constituted by SEQ ID NO 20,
CCR2 receptor, in particular the human CCR2 receptor, in particular comprising or constituted by SEQ ID NO 231.

28. The hybrid protein according claim 22, wherein said ion channel is Kir6.2 protein,
said Kir6.2 being preferably chosen among the group comprising of:
the murine or human Kir6.2 ion channel in its natural configuration, and in particular comprising or being constituted by the amino acid sequence SEQ ID NO 2, or SEQ ID NO 6, or
the murine or human Kir6.2 ion channel deleted from 1 to 36 of its 36 last amino acids at the C-terminus, and in particular comprising or being constituted by the amino acid sequence SEQ ID NO 4 or SEQ ID NO 8.

29. The hybrid protein according to claim 22, wherein said hybrid protein is preferably chosen among the group consisting in SEQ ID NO 2q, q varying from 15 to 78 and from 99 to 103.

30. The hybrid protein according to claim 22, said hybrid protein being inserted in a membrane, preferably a membrane comprising lipids.

31. A nucleic acid molecule coding for the hybrid protein according to claim 22, in particular having a nucleic acid sequence chosen among the group consisting SEQ ID NO 2q-1, q varying from 15 to 78 and from 99 to 103, and comprising elements allowing the expression of said nucleic acid molecule in host cells such as among bacteria, yeast, mammals cells, insect cells or amphibian oocytes.

32. A method for in vitro diagnosis, in a biological sample of a subject, of pathologies associated with the presence or absence or the variation of amount of a molecule modifying the receptor activity of a first membrane receptor in its natural configuration,
said presence or absence or variation of amount of said molecule being assessed with respect to the presence or absence or the given amount of said molecule, in a sample isolated from an healthy subject, comprising:
contacting said hybrid protein, preferably said hybrid protein being a hybrid protein according to claim 22, preferably immobilized in a support, with a biological sample, said biological sample being liable to contain molecule being able to selectively interact with first membrane receptor part of said hybrid protein,
measuring the current generated by the ion channel part of the said hybrid protein, preferably measured by appropriate means of electrophysiology, or reconstitution in artificial lipid bilayers, or any techniques designed to measure ion flux through potassium channels,
comparing said current generated with the current generated with by said hybrid protein contacted with control sample, said control sample corresponding to sample either not containing said molecule, or containing a given amount of said molecule,
determining, from the previous steps, if the subject is afflicted by said pathologies,
said hybrid protein comprising or consisting in
a. the sequence of a first membrane receptor, said first membrane receptor belonging to the G-protein coupled receptors (GPCR) class A family, covalently fused at its C-terminus to
b. the N-terminus sequence of an ion channel, said ion channel belonging to the potassium channel families selected from the inwardly rectifying potassium channels (Kir) family and the voltage-dependent potassium channels (Kᵥ) family,
said ion channel sequence being deleted of a number of amino acids ranging from 1 to the total number of amino acids of the region extending from the first amino acid at the N-terminus part of said ion channel to the first amino acid of the cytoplasmic α-helix that precedes the first of the two transmembrane α-helices that form the pore region of said potassium channel,
said ion channel possibly containing a tag sequence,
said first membrane receptor being liable to present in its cytoplasmic tail, said cytoplasmic tail being a sequence delimited by the first amino acid after the last amino acid of the transmembrane helix and the last amino acid of said first membrane receptor,
a deletion of a number of amino acids ranging from 1 to the total number of amino acids of the region delimited by the cytoplasmic tail, and/or
an addition, of an additional sequence of a number of amino acids ranging from 1 to the total number of amino acids of the region delimited by the cytoplasmic tail, originating from a second membrane receptor different from said first membrane receptor, preferably said additional sequence corresponding to the C-terminus of said second membrane receptor and/or
a substitution of a number of amino acids ranging from 1 to the total number of amino acids of the region delimited by the cytoplasmic tail, with an substitute sequence of a number of amino acids ranging from 1 to the total number of amino acids of the region delimited by the cytoplasmic tail from a second membrane receptor different from said first membrane receptor
said hybrid protein being such that said ion channel retains the property of electrical current generation of said ion channel in its natural configuration, and that said first membrane receptor retains the ability to interact with the ligand of said first membrane receptor in its natural configuration.

33. A method for screening a compound able to modify the activity of a first membrane receptor in its natural configuration, said compound being preferably an agonist or an antagonist,
comprising:
contacting a compound, with a hybrid protein, preferably said hybrid protein being a hybrid protein according to claim 22, preferably immobilized on a support, in presence of a ligand of said membrane receptor,
measuring the current generated by the ion channel of the said hybrid protein, preferably measured by appropriate means of electrophysiology, or reconstitution in artificial lipid bilayers, or any technique designed to directly or indirectly measure ion flux through potassium channels,
comparing said current generated with the current generated with by said hybrid protein contacted with an identified compound known to modify said receptor activity,
determining, from the previous steps the effect of said compound on the activity of said first membrane receptor in its natural configuration
said hybrid protein comprising or consisting in
a. the sequence of a first membrane receptor, said first membrane receptor belonging to the G-protein coupled receptors (GPCR) class A family, covalently fused at its C-terminus to
b. the N-terminus sequence of an ion channel, said ion channel belonging to the potassium channel families selected from the inwardly rectifying potassium channels (Kir) family and the voltage-dependent potassium channels (Kᵥ) family,
said ion channel sequence being deleted of a number of amino acids ranging from 1 to the total number of amino acids of the region extending from the first amino acid at the N-terminus part of said ion channel to the first amino acid of the cytoplasmic α-helix that precedes the first of the two transmembrane α-helices that form the pore region of said potassium channel,
said ion channel possibly containing a tag sequence,
said first membrane receptor being liable to present in its cytoplasmic tail, said cytoplasmic tail being a sequence delimited by the first amino acid after the last amino acid of the transmembrane helix and the last amino acid of said first membrane receptor,
a deletion of a number of amino acids ranging from 1 to the total number of amino acids of the region delimited by the cytoplasmic tail, and/or
an addition, of an additional sequence of a number of amino acids ranging from 1 to the total number of amino acids of the region delimited by the cytoplasmic tail, originating from a second membrane receptor different from said first membrane receptor, preferably said additional sequence corresponding to the C-terminus of said second membrane receptor and/or
a substitution of a number of amino acids ranging from 1 to the total number of amino acids of the region delimited by the cytoplasmic tail, with an substitute sequence of a number of amino acids ranging from 1 to the total number of amino acids of the region delimited by the cytoplasmic tail from a second membrane receptor different from said first membrane receptor
said hybrid protein being such that said ion channel retains the property of electrical current generation of said ion channel in its natural configuration, and that said first membrane receptor retains the ability to interact with the ligand of said first membrane receptor in its natural configuration.

34. The method according to claim 32, wherein said hybrid protein is immobilized on a support chosen among the group consisting in artificial membrane, natural or artificial membrane containing lipids, and chip comprising artificial membrane, or natural or artificial membrane containing lipids, or incorporated in the membrane of cells or liposomes.

35. The method according to claim 33, wherein said hybrid protein is immobilized on a support chosen among the group consisting in artificial membrane, natural or artificial membrane containing lipids, and chip comprising artificial membrane, or natural or artificial membrane containing lipids, or incorporated in the membrane of cells or liposomes.
